(19) United States
(12) Patent Application Publication
(10) Pub. No.: US 2019/0369114 A1
(43) Pub. Date: Dec. 5, 2019

(54) HIGHLY MULTIPLEXED AND MASS SPECTROMETRY BASED METHODS TO MEASURING 72 HUMAN PROTEINS

(71) Applicant: Cedars-Sinai Medical Center, Los Angeles, CA (US)

(72) Inventors: Jennifer VAN EYK, Los Angeles, CA (US); Qin FU, Beverly Hills, CA (US); Vidya VENKATRAMAN, Los Angeles, CA (US); Irina TCHERNYSHYOV, Baltimore, MD (US)

(73) Assignee: Cedars-Sinai Medical Center, Los Angeles, CA (US)

(21) Appl. No.: 16/515,458

(22) Filed: Jul. 18, 2019

Related U.S. Application Data
(63) Continuation of application No. PCT/US2018/014570, filed on Jan. 19, 2018.
(60) Provisional application No. 62/448,319, filed on Jan. 19, 2017.

(51) Int. Cl. G01N 33/68; C12Q 1/37

(52) U.S. Cl. CPC G01N 33/6848; C12Q 1/37; C12Y 304/21004; G01N 2560/00; G01N 2800/60; G01N 2800/50; G01N 2800/32

(57) ABSTRACT

Sample preparation for proteomic analysis of complex biological samples by mass spectrometry is a tedious and time-consuming process with many steps where technical variations can be introduced and propagated. We describe an automated trypsin digestion workflow that yields uniformly-processed samples in less than 5 hours. Reproducible quantitation of hundreds of peptides from numerous proteins was seen across replicates, days, instruments, and laboratory sites, demonstrating the broad applicability of this approach.

### CROSS-REFERENCE TO RELATED APPLICATION

[0001] This application claims the benefit under 35 U.S.C. § 119(e) of U.S. Provisional Patent Application No. 62/448,319 filed on Jan. 19, 2017, which is incorporated herein by reference in its entirety.

### STATEMENT REGARDING FEDERALLY SPONSORED RESEARCH OR DEVELOPMENT

[0002] This invention was made with government support under Grant No. HL111362 awarded by National Institutes of Health. The government has certain rights in the invention.

### SEQUENCE LISTING

[0003] The instant application contains a Sequence Listing which has been submitted electronically in ASCII format and is hereby incorporated by reference in its entirety. Said ASCII copy, created on Jan. 19, 2018, is named SequenceListing-065472-000652WO00_ST25.txt and is 791,213 bytes in size.

### FIELD OF THE INVENTION

[0004] Methods for obtaining a biomarker signature for a subject using mass spectrometry. A protein panel for determining the state of health of a subject, diagnosing disease in a subject, and determining risk of developing a disease in a subject.

### BACKGROUND

[0005] All publications herein are incorporated by reference to the same extent as if each individual publication or patent application was specifically and individually indicated to be incorporated by reference. The following description includes information that may be useful in understanding the present invention. It is not an admission that any of the information provided herein is prior art or relevant to the presently claimed invention, or that any publication specifically or implicitly referenced is prior art.

[0006] The traditional biomarker development pipeline consists of two steps: shotgun proteomics for global protein discovery to create an in-depth protein inventory; and targeted proteomics for verification and validation aiming for high precision and high throughput protein quantitation. Liquid chromatography (LC) coupled with selected reaction monitoring mass spectrometry (SRM-MS) allows precise quantitation of proteotypic peptides (as surrogates for the corresponding protein) in 10s to 1000s of complex samples derived, for example, from bodily fluids, biopsies, or cultured cells, and is the method of choice for targeted biomarker validation. An emerging method, data-independent acquisition (DIA) mass spectrometry (MS), provides global and quantitative information simultaneously. Regardless of the MS approach, sample preparation, which mainly centers on enzymatic cleavage of proteins into a peptide mixture, is fundamental. However, throughput, reproducibility, time, and cost remain longstanding barriers to the necessary large-scale MS sample processing. The development of a fast, highly accurate, and completely hands-free MS protein sample preparation workflow would make the entire pathway from biomarker discovery to biomarker validation more robust.

[0007] Sample preparation for LC-MS/MS analysis is a multi-step process involving i) protein solubilization and denaturation, ii) disulfide bond reduction and cysteine-blocking to ensure consistent cysteine masses, iii) digestion of proteins into peptides with a site-specific protease (most often trypsin), and iv) clean-up to remove salts, denaturing agents, and other interfering compounds (typically by solid-phase extraction). Previous studies have shown that sample preparation, particularly the trypsin digestion step, is a major source for variability in the LC-MS/MS analysis. Optimal digestion conditions depend on both general and protein-specific factors including the trypsin-to-substrate ratio, buffer composition, protein structure, and the sequence and modifications (e.g., post translational modifications) adjacent to cleavage sites. It is, therefore, essential to have a highly controlled and standardized digestion method to meet the precision and reproducibility standards essential for reliable biomarker verification. To enhance precision and accuracy, each sample preparation step must have accurate liquid transfers, be initiated and stopped at a consistent time, be performed at a controlled temperature and have good mixing for uniform reactions. Automation provides a good solution for these requirements. In this communication, we describe an automated proteomics sample preparation workflow that yields reproducible quantitation data on complex proteomic samples and has been implemented in two different laboratories.

### SUMMARY OF THE INVENTION

[0008] The following embodiments and aspects thereof are described and illustrated in conjunction with systems, compositions and methods which are meant to be exemplary and illustrative, not limiting in scope.

[0009] Various embodiments of the present invention provide a method of obtaining a biomarker signature for a subject, the method comprising: obtaining a sample from the subject; treating the sample with a protease to obtain a digested sample; and measuring in the digested sample a representation of one or more biomarkers to obtain the biomarker signature for the subject, wherein the measuring is performed using a mass spectrometer and a mass spectrometry technique, and the representation of the one or more biomarkers is obtained using a mass spectrometry assay, wherein the mass spectrometry assay comprises a quantitation of two or more Q1/Q3 mass value pairs according to Table 5, wherein each Q1/Q3 mass value pair is used to quantify a corresponding peptide and protein according to Table 5. In some embodiments, the protease is trypsin, chymotrypsin, endoproteinase Lys-C, endoproteinase Asp-N, pepsin, thermolysin, papain, proteinase K, subtilisin, clostripain, exopeptidase, carboxypeptidase, cathepsin C, cyanogen bromide, formic acid, hydroxylamine, or NTCB, or a combination thereof. In some embodiments, the protease is trypsin. In some embodiments, the mass spectrometer is a triple quadrupole mass spectrometer. In some embodiments, each Q1/Q3 mass value pair are correlated to the one or more peptides according to Table 5. In some embodiments, the one or more peptides are correlated to one or more proteins according to Table 5. In some embodiments, the one or more biomarkers are the one or more proteins according to Table 5. In some embodiments, the mass spectrometry technique is selected reaction monitoring (SRM) or multiple reaction monitoring (MRM). In some embodiments, the mass spectrometry technique is liquid chromatography-selected reaction monitoring-mass spectrometry (LC-SRM-MS). In some embodiments, the mass spectrometry technique is data-independent acquisition mass spectrometry (DIA MS). In some embodiments, the method further comprises adding a stable-isotope labeled peptide standard to the sample. In some embodiments, the method further comprises comparing the biomarker signature from the subject to a biomarker signature from a reference sample. In some embodiments, the method further comprises making an assessment of the subject based on the comparison, wherein the assessment is a diagnosis of a disease. In some embodiments, the sample is plasma, serum, cerebrospinal fluid (CSF), a tissue extract, or a biopsy sample. In some embodiments, the reference sample is obtained from a control subject, wherein the control subject does not have the disease. In some embodiments, the reference sample is obtained from the subject before the subject is treated for the disease. In some embodiments, the reference sample is from a subject that has been successfully treated for the disease.

[0010] Various embodiments of the present invention provide a method of treating a subject for a disease, the method comprising: (a) making an assessment of the subject based on a biomarker signature for the subject, wherein the assessment is a diagnosis of the disease; and (b) treating the subject based on the assessment, wherein the biomarker signature for the subject is obtained by a method comprising, obtaining a sample from the subject; treating the sample with a protease to obtain a digested sample; and measuring in the digested sample a representation of one or more biomarkers to obtain the biomarker signature for the subject, wherein the measuring is performed using a mass spectrometer and a mass spectrometry technique, and the representation of the one or more biomarkers is obtained using a mass spectrometry assay, wherein the mass spectrometry assay comprises a quantitation of two or more Q1/Q3 mass value pairs according to Table 5, wherein each Q1/Q3 mass value pair is used to quantify a corresponding peptide and protein according to Table 5. In some embodiments, the method further comprises adding a stable-isotope labeled peptide standard to the sample.

[0011] Various embodiments of the present invention provide a method of obtaining a biomarker signature for a subject, the method comprising: obtaining a sample from the subject; treating the sample with a protease to obtain a digested sample; and measuring in the digested sample a representation of one or more biomarkers to obtain the biomarker signature for the subject, wherein the measuring is performed using a mass spectrometer and a mass spectrometry technique, and the representation of the one or more biomarkers is obtained using a mass spectrometry assay, wherein the mass spectrometry assay comprises a quantitation of two or more Q1 mass values according to Table 5, wherein each Q1 mass value is used to quantify a corresponding peptide and protein according to Table 5. In some embodiments, the protease is trypsin, chymotrypsin, endoproteinase Lys-C, endoproteinase Asp-N, pepsin, thermolysin, papain, proteinase K, subtilisin, clostripain, exopeptidase, carboxypeptidase, cathepsin C, cyanogen bromide, formic acid, hydroxylamine, or NTCB, or a combination thereof. In some embodiments, the protease is trypsin. In some the mass spectrometer is a quadrupole time-of-flight (QTOF) mass spectrometer or a hybrid quadrupole-orbitrap (QOrbitrap) mass spectrometer. In some embodiments, each Q1 mass value is correlated to the one or more peptides according to Table 5. In some embodiments, the one or more peptides are correlated to one or more proteins according to Table 5. In some embodiments, the one or more biomarkers are the one or more proteins according to Table 5. In some embodiments, the mass spectrometry technique is parallel reaction monitoring (PRM). In some embodiments, the mass spectrometry technique is liquid chromatography-parallel reaction monitoring-mass spectrometry (LC-PRM-MS). In some embodiments, the method further comprises adding a stable-isotope labeled peptide standard to the sample. In some embodiments, the method further comprises comparing the biomarker signature from the subject to a biomarker signature from a reference sample. In some embodiments, the method further comprises making an assessment of the subject based on the comparison, wherein the assessment is a diagnosis of a disease. In some embodiments, the sample is plasma, serum, cerebrospinal fluid (CSF), a tissue extract, or a biopsy sample. In some embodiments, the reference sample is obtained from a control subject, wherein the control subject does not have the disease. In some embodiments, the reference sample is obtained from the subject before the subject is treated for the disease. In some embodiments, the reference sample is from a subject that has been successfully treated for the disease.

[0012] Various embodiments of the present invention provide a method of treating a subject for a disease, the method comprising: (a) making an assessment of the subject based on a biomarker signature for the subject, wherein the assessment is a diagnosis of the disease; and (b) treating the subject based on the assessment, wherein the biomarker signature for the subject is obtained by a method comprising: obtaining a sample from the subject; treating the sample with a protease to obtain a digested sample; and measuring in the digested sample a representation of one or more biomarkers to obtain the biomarker signature for the subject, wherein the measuring is performed using a mass spectrometer and a mass spectrometry technique, and the representation of the one or more biomarkers is obtained using a mass spectrometry assay, wherein the mass spectrometry assay comprises a quantitation of two or more Q1 mass values according to Table 5, wherein each Q1 mass value is used to quantify a corresponding peptide and protein according to Table 5. In some embodiments, the method further comprises adding a stable-isotope labeled peptide standard to the sample.

[0013] Various embodiments of the present invention provide a method for assessing the efficacy of a treatment, comprising: comparing a biomarker signature from a subject to a biomarker signature from a reference sample, wherein a change in the biomarker signature from the subject relative to the biomarker signature from the reference sample is indicative of the efficacy of the treatment, wherein the treatment is according to a method of treating a subject for a disease, the method comprising: (a) making an assessment of the subject based on the biomarker signature, wherein the assessment is a diagnosis of the disease; and (b) treating the subject based on the assessment, wherein the biomarker signature for the subject is obtained by a method comprising, obtaining a sample from the subject; treating the sample with a protease to obtain a digested sample; and measuring in the digested sample a representation of one or more biomarkers to obtain the biomarker signature for the subject, wherein the measuring is performed using a mass spectrometer and a mass spectrometry technique, and the representation of the one or more biomarkers is obtained using a mass spectrometry assay, wherein the mass spectrometry assay comprises a quantitation of two or more Q1/Q3 mass value pairs according to Table 5, wherein each Q1/Q3 mass value pair is used to quantify a corresponding peptide and protein according to Table 5. In some embodiments, the reference sample is obtained from a control subject, wherein the control subject does not have the disease. In some embodiments, the reference sample is obtained from the subject before the subject is treated for the disease. In some embodiments, the reference sample is from a subject that has been successfully treated for the disease. In some embodiments, the method further comprises adding a stable-isotope labeled peptide standard to the sample.

[0014] Various embodiments of the present invention provide a method for assessing the efficacy of a treatment, comprising: comparing a biomarker signature from a subject to a biomarker signature from a reference sample, wherein a change in the biomarker signature from the subject relative to the biomarker signature from the reference sample is indicative of the efficacy of the treatment, wherein the treatment is according to a method of treating a subject for a disease, the method comprising: (a) making an assessment of the subject based on the biomarker signature, wherein the assessment is a diagnosis of the disease; and (b) treating the subject based on the assessment, wherein the biomarker signature for the subject is obtained by a method comprising: obtaining a sample from the subject; treating the sample with a protease to obtain a digested sample; and measuring in the digested sample a representation of one or more biomarkers to obtain the biomarker signature for the subject, wherein the measuring is performed using a mass spectrometer and a mass spectrometry technique, and the representation of the one or more biomarkers is obtained using a mass spectrometry assay, wherein the mass spectrometry assay comprises a quantitation of two or more Q1 mass values according to Table 5, wherein each Q1 mass value is used to quantify a corresponding peptide and protein according to Table 5. In some embodiments, the reference sample is obtained from a control subject, wherein the control subject does not have the disease. In some embodiments, the reference sample is obtained from the subject before the subject is treated for the disease. In some embodiments, the reference sample is from a subject that has been successfully treated for the disease. In some embodiments, the method further comprises adding a stable-isotope labeled peptide standard to the sample.

[0015] In various embodiments, the present invention provides a protein panel for assessing and/or determining the state of health of a subject, the protein panel comprising one or more proteins listed in Table 15. In some embodiments, the one or more proteins are biomarkers for one or more functions or combination thereof. In some embodiments, the functions are inflammatory response, lipid metabolism, redox signaling, immune response, or endothelial dysfunction. In some embodiments, the functions are lipid metabolism, immune response, coagulation, inflammatory response, or redox signaling. In some embodiments, the function is inflammatory response and the proteins are any one or more of Alpha-2-macroglobulin (UniProt Accession No. P01023) (SEQ ID NO: 15), Angiotensinogen (UniProt Accession No. P01019) (SEQ ID NO: 14), Alpha-2-HS-glycoprotein (UniProt Accession No. P02765) (SEQ ID NO: 35), Apolipoprotein A-I (UniProt Accession No. P02647) (SEQ ID NO: 21), Apolipoprotein E (UniProt Accession No. P02649) (SEQ ID NO: 22), Complement C3 (UniProt Accession No. P01024) (SEQ ID NO: 16), Complement C5 (UniProt Accession No. P01031) (SEQ ID NO: 17), Complement factor H (UniProt Accession No. P08603) (SEQ ID NO: 56), C-reactive protein (UniProt Accession No. P02741) (SEQ ID NO: 28), Coagulation factor XII (UniProt Accession No. P00748) (SEQ ID NO: 9), Prothrombin (UniProt Accession No. P00734) (SEQ ID NO: 4), Vitamin D-binding protein (UniProt Accession No. P02774) (SEQ ID NO: 37), Gelsolin (UniProt Accession No. P06396) (SEQ ID NO: 51), Haptoglobin (UniProt Accession No. P00738) (SEQ ID NO: 6), Ig mu chain C region (UniProt Accession No. P01871) (SEQ ID NO: 19), Plasma kallikrein (UniProt Accession No. P03952) (SEQ ID NO: 40), Apolipoprotein(a) (UniProt Accession No. P08519) (SEQ ID NO: 55), Lumican (UniProt Accession No. P51884) (SEQ ID NO: 69), Alpha-1-acid glycoprotein 1 (UniProt Accession No. P02763) (SEQ ID NO: 34), Plasminogen (UniProt Accession No. P00747) (SEQ ID NO: 8), Serum paraoxonase/arylesterase 1 (UniProt Accession No. P27169) (SEQ ID NO: 65), Alpha-1-antitrypsin (UniProt Accession No. P01009) (SEQ ID NO: 12), Alpha-1-antichymotrypsin (UniProt Accession No. P01011) (SEQ ID NO: 13), Plasma protease C1 inhibitor (UniProt Accession No. P05155) (SEQ ID NO: 48), Vitronectin (UniProt Accession No. P04004) (SEQ ID NO: 42) or combinations thereof. In some embodiments, the function is lipid metabolism and the proteins are any one or more of Angiotensinogen (UniProt Accession No. P01019) (SEQ ID NO: 14), Alpha-2-HS-glycoprotein (UnitProt Accession No. P02765) (SEQ ID NO: 35), Serum albumin (UniProt Accession No. P02768) (SEQ ID NO: 36), Apolipoprotein A-I (UniProt Accession No. P02647) (SEQ ID NO: 21), Apolipoprotein A-II (UniProt Accession No. P02652) (SEQ ID NO: 23), Apolipoprotein A-IV (UniProt Accession No. P06727) (SEQ ID NO: 52), Apolipoprotein B-100 (UniProt Accession No. P04114) (SEQ ID NO: 43), Apolipoprotein C-I (UniProt Accession No. P02654) (SEQ ID NO: 24), Apolipoprotein C-III (UniProt Accession No. P02656) (SEQ ID NO: 26), Apolipoprotein E (UniProt Accession No. P02649) (SEQ ID NO: 22), Complement C3 (UniProt Accession No. P01024) (SEQ ID NO: 16), Complement C5 (UniProt Accession No. P01031) (SEQ ID NO: 17), Complement factor B (UniProt Accession No. P00751) (SEQ ID NO: 10), Complement factor H (UniProt Accession No. P08603) (SEQ ID NO: 56), Clusterin (UniProt Accession No. P10909) (SEQ ID NO: 61), C-reactive protein (UniProt Accession No. P02741) (SEQ ID NO: 28), Prothrombin (UniProt Accession No. P00734) (SEQ ID NO: 4), Vitamin D-binding protein (UniProt Accession No. P02774) (SEQ ID NO: 37), Haptoglobin (UniProt Accession No. P00738) (SEQ ID NO. 6), Plasma kallikrein (UniProt Accession No. P03952) (SEQ ID NO: 40), Apolipoprotein(a) (UniProt Accession No. P08519) (SEQ ID NO: 55), Plasminogen (UniProt Accession No. P00747) (SEQ ID NO: 8), Serum paraoxonase/arylesterase 1 (UniProt Accession No. P27169) (SEQ ID NO: 65), Serum paraoxonase/lactonase 3 (UniProt Accession No. Q15166) (SEQ ID NO: 72), sex hormone binding globulin (UniProt Accession No. P04278) (SEQ ID NO: 46) or combinations thereof. In some embodiments, the function is redox signaling and the proteins are any one or more of Angiotensinogen (UniProt Accession No. P01019) (SEQ ID NO: 14), Serum albumin (UniProt Accession No. P02768) (SEQ ID NO: 36), Apolipoprotein A-I (UniProt Accession No. P02647) (SEQ ID NO: 21), Apolipoprotein A-IV (UniProt Accession No. P06727) (SEQ ID NO: 52), Apolipoprotein C-II (UniProt Accession No. P02655) (SEQ ID NO: 25), Apolipoprotein E (UniProt Accession No. P02649) (SEQ ID NO: 22), Complement C3 (UniProt Accession No. P01024) (SEQ ID NO: 16), Complement C5 (UniProt Accession No. P01031) (SEQ ID NO: 17), Complement factor B (UniProt Accession No. P00751) (SEQ ID NO: 10), Complement factor H (UniProt Accession No. P08603) (SEQ ID NO: 56), C-reactive protein (UniProt Accession No. P02741) (SEQ ID NO: 28), Prothrombin (UniProt Accession No. P00734) (SEQ ID NO: 4), Gelsolin (UniProt Accession No. P06396) (SEQ ID NO: 51), Hemoglobin subunit alpha (UniProt Accession No. P69905) (SEQ ID NO: 70), Haptoglobin (UniProt Accession No. P00738) (SEQ ID NO: 6), Inter-alpha-trypsin inhibitor heavy chain H4 (UniProt Accession No. Q14624) (SEQ ID NO: 71), Serum paraoxonase/lactonase 3 (UniProt Accession No. Q15166) (SEQ ID NO: 72), Peroxiredoxin-2 (UniProt Accession No. P32119) (SEQ ID NO: 66), Alpha-1-antitrypsin (UniProt Accession No. P01009) (SEQ ID NO: 12), Alpha-1-antichymotrypsin (UniProt Accession No. P01011) (SEQ ID NO: 13), Serotransferrin (UniProt Accession No. P02787) (SEQ ID NO: 38), or combinations thereof. In some embodiments, the function is immune response and the proteins are any one or more of Complement C1q subcomponent subunit B (UniProt Accession No. P02746) (SEQ ID NO: 29), Complement C1q subcomponent subunit C (UniProt Accession No. P02747) (SEQ ID NO: 30), Complement C1r subcomponent (UniProt Accession No. P00736) (SEQ ID NO: 50), Complement C1s subcomponent (UniProt Accession No. P09871) (SEQ ID NO: 58), Complement C3 (UniProt Accession No. P01024) (SEQ ID NO: 16), Complement C4-A (UniProt Accession No. P0C0L4) (SEQ ID NO: 59), Complement C5 (UniProt Accession No. P01031) (SEQ ID NO: 17), Complement component C8 alpha chain (UniProt Accession No. P07357) (SEQ ID NO: 53), Complement component C9 (UniProt Accession No. P02748) (SEQ ID NO: 31), Complement factor B (UniProt Accession No. P00751) (SEQ ID NO: 10), Plasma protease C1 inhibitor (UniProt Accession No. P05155) (SEQ ID NO: 48), or combinations thereof. In some embodiments, the function is endothelial dysfunction and the proteins are any one or more of Angiotensinogen (UniProt Accession No. P01019) (SEQ ID NO: 14), C-reactive protein (UniProt Accession No. P02741) (SEQ ID NO: 28), Lumican (UniProt Accession No. P51884) (SEQ ID NO: 69), Plasminogen (UniProt Accession No. P00747) (SEQ ID NO: 8), Peroxiredoxin-2 (UniProt Accession No. P32119) (SEQ ID NO: 66), Alpha-1-antitrypsin (UniProt Accession No. P01009) (SEQ ID NO: 12), Alpha-1-anti chymotrypsin (UniProt Accession No. P01011) (SEQ ID NO: 13), Antithrombin-III (UniProt Accession No. P01008) (SEQ ID NO: 11), or combinations thereof. In some embodiments, the function is coagulation and the proteins are any one or more of Serum albumin (UniProt Accession No. P02768) (SEQ ID NO: 36), Apolipoprotein E (UniProt Accession No. P02649) (SEQ ID NO: 22), Complement C3 (UniProt Accession No. P01024) (SEQ ID NO: 16), Complement C4-A (UniProt Accession No. P0C0L4) (SEQ ID NO: 59), Complement C4-B (UniProt Accession No. P0C0L5) (SEQ ID NO: 60), Complement C5 (UniProt Accession No. P01031) (SEQ ID NO: 17), Complement component C9 (UniProt Accession No. P02748) (SEQ ID NO: 31), Complement factor B (UniProt Accession No. P00751) (SEQ ID NO: 10), Complement factor H (UniProt Accession No.) (SEQ ID NO: 56), C-reactive protein (UniProt Accession No. P02741) (SEQ ID NO: 28), Coagulation factor X (UniProt Accession No. P00742) (SEQ ID NO: 7), Coagulation factor XII (UniProt Accession No. P00748) (SEQ ID NO: 9), Prothrombin (UniProt Accession No. P00734) (SEQ ID NO: 4), Fibrinogen (UniProt Accession No. P02671) (SEQ ID NO: 27), Haptoglobin (UniProt Accession No. P00738) (SEQ ID NO: 6), Integrin alpha-Iib (UniProt Accession No. P08514) (SEQ ID NO: 54), Plasma kallikrein (UniProt Accession No. P03952) (SEQ ID NO: 40), Apolipoprotein(a) (UniProt Accession No. P08519) (SEQ ID NO: 55), Plasminogen (UniProt Accession No. P00747) (SEQ ID NO: 8), Serum paraoxonase/arylesterase 1 (UniProt Accession No. P27169) (SEQ ID NO: 65), Peroxiredoxin-2 (UniProt Accession No. P32119) (SEQ ID NO: 66), Plasma serine protease inhibitor (UniProt Accession No. P05154) (SEQ ID NO: 47), Antithrombin-III (UniProt Accession No. P01008) (SEQ ID NO: 11), Heparin cofactor 2 (UniProt Accession No. P05546) (SEQ ID NO: 50), Alpha-2-antiplasmin (UniProt Accession No. P08697) (SEQ ID NO: 57), Vitronectin (UniProt Accession No. P04004) (SEQ ID NO: 42), von Willebrand factor (UniProt Accession No. P04275) (SEQ ID NO: 45), or combinations thereof. In some embodiments, the function is lipid metabolism and the proteins are any one or more of Angiotensinogen (UniProt Accession No. P01019) (SEQ ID NO: 14), Alpha-2-HS-glycoprotein (UnitProt Accession No. P02765) (SEQ ID NO: 35), Serum albumin (UniProt Accession No. P02768) (SEQ ID NO: 36), Apolipoprotein A-I (UniProt Accession No. P02647) (SEQ ID NO: 21), Apolipoprotein A-II (UniProt Accession No. P02652) (SEQ ID NO: 23), Apolipoprotein A-IV (UniProt Accession No. P06727) (SEQ ID NO: 52), Apolipoprotein B-100 (UniProt Accession No. P04114) (SEQ ID NO: 43), Apolipoprotein C-I (UniProt Accession No. P02654) (SEQ ID NO: 24), Apolipoprotein C-III (UniProt Accession No. P02656) (SEQ ID NO: 26), Apolipoprotein E (UniProt Accession No. P02649) (SEQ ID NO: 22), Zinc-alpha-2-glycoprotein (UniProt Accession No. P25311) (SEQ ID NO: 64), Complement C3 (UniProt Accession No. P01024) (SEQ ID NO: 16), Complement C5 (UniProt Accession No. P01031) (SEQ ID NO: 17), Complement factor B (UniProt Accession No. P00751) (SEQ ID NO: 10), Complement factor H (UniProt Accession No. P08603) (SEQ ID NO: 56), Clusterin (UniProt Accession No. P10909) (SEQ ID NO: 61), C-reactive protein (UniProt Accession No. P02741) (SEQ ID NO: 28), Prothrombin (UniProt Accession No. P00734) (SEQ ID NO: 4), Vitamin D-binding protein (UniProt Accession No. P02774) (SEQ ID NO: 37), Haptoglobin (UniProt Accession No. P00738) (SEQ ID NO. 6), Plasma kallikrein (UniProt Accession No. P03952) (SEQ ID NO: 40), Apolipoprotein(a) (UniProt Accession No. P08519) (SEQ ID NO: 55), Plasminogen (UniProt Accession No. P00747) (SEQ ID NO: 8), Serum paraoxonase/arylesterase 1 (UniProt Accession No. P27169) (SEQ ID NO: 65), Serum paraoxonase/lactonase 3 (UniProt Accession No. Q15166) (SEQ ID NO: 72), Alpha-1-antitrypsin (UniProt Accession No. P01009) (SEQ ID NO: 12), sex hormone binding globulin (UniProt Accession No. P04278) (SEQ ID NO: 46) or combinations thereof. In some embodiments, the function is inflammatory response and the proteins are any one or more of Alpha-2-macroglobulin (UniProt Accession No. P01023) (SEQ ID NO: 15), Angiotensinogen (UniProt Accession No. P01019) (SEQ ID NO: 14), Alpha-2-HS-glycoprotein (UniProt Accession No. P02765) (SEQ ID NO: 35), Apolipoprotein A-I (UniProt Accession No. P02647) (SEQ ID NO: 21), Apolipoprotein E (UniProt Accession No. P02649) (SEQ ID NO: 22), Complement C3 (UniProt Accession No. P01024) (SEQ ID NO: 16), Complement C5 (UniProt Accession No. P01031) (SEQ ID NO: 17), Complement factor H (UniProt Accession No. P08603) (SEQ ID NO: 56), C-reactive protein (UniProt Accession No. P02741) (SEQ ID NO: 28), C-reactive protein (UniProt Accession No. P02741) (SEQ ID NO: 28), Coagulation factor XII (UniProt Accession No. P00748) (SEQ ID NO: 9), Prothrombin (UniProt Accession No. P00734) (SEQ ID NO: 4), Vitamin D-binding protein (UniProt Accession No. P02774) (SEQ ID NO: 37), Gelsolin (UniProt Accession No. P06396) (SEQ ID NO: 51), Haptoglobin (UniProt Accession No. P00738) (SEQ ID NO: 6), Ig mu chain C region (UniProt Accession No. P01871) (SEQ ID NO: 19), Plasma kallikrein (UniProt Accession No. P03952) (SEQ ID NO: 40), Apolipoprotein(a) (UniProt Accession No. P08519) (SEQ ID NO: 55), Lumican (UniProt Accession No. P51884) (SEQ ID NO: 69), Alpha-1-acid glycoprotein 1 (UniProt Accession No. P02763) (SEQ ID NO: 34), Plasminogen (UniProt Accession No. P00747) (SEQ ID NO: 8), Serum paraoxonase/arylesterase 1 (UniProt Accession No. P27169) (SEQ ID NO: 65), Alpha-1-antitrypsin (UniProt Accession No. P01009) (SEQ ID NO: 12), Alpha-1-antichymotrypsin (UniProt Accession No. P01011) (SEQ ID NO: 13), Plasma protease C1 inhibitor (UniProt Accession No. P05155) (SEQ ID NO: 48), Vitronectin (UniProt Accession No. P04004) (SEQ ID NO: 42) or combinations thereof. In some embodiments, the function is immune response and the proteins are any one or more of Angiotensinogen (UniProt Accession No. P01019) (SEQ ID NO: 14), Alpha-2-HS-glycoprotein (UniProt Accession No. P02765) (SEQ ID NO: 35), Apolipoprotein A-I (UniProt Accession No. P02647) (SEQ ID NO: 21), Apolipoprotein A-II (UniProt Accession No. P02652) (SEQ ID NO: 23), Apolipoprotein E (UniProt Accession No. P02649) (SEQ ID NO: 22), Complement C1q subcomponent subunit B (UniProt Accession No. P02746) (SEQ ID NO: 29), Complement C1q subcomponent subunit C (UniProt Accession No. P02747) (SEQ ID NO: 30), Complement C1r subcomponent (UniProt Accession No. P00736) (SEQ ID NO: 50), Complement C1s subcomponent (UniProt Accession No. P09871) (SEQ ID NO: 58), Complement C3 (UniProt Accession No. P01024) (SEQ ID NO: 16), Complement C4-A (UniProt Accession No. P0C0L4) (SEQ ID NO: 59), Complement C4-B (UniProt Accession No. P0C0L5) (SEQ ID NO: 60), Complement C5 (UniProt Accession No. P01031) (SEQ ID NO: 17), Complement component C8 alpha chain (UniProt Accession No. P07357) (SEQ ID NO: 53), Complement component C9 (UniProt Accession No. P02748) (SEQ ID NO: 31), Complement factor B (UniProt Accession No. P00751) (SEQ ID NO: 10), Complement factor H (UniProt Accession No. P08603) (SEQ ID NO: 56), C-reactive protein (UniProt Accession No. P02741) (SEQ ID NO: 28), Coagulation factor X (UniProt Accession No. P00742) (SEQ ID NO: 7), Gelsolin (UniProt Accession No. P06396) (SEQ ID NO: 51), Ig alpha-1 chain C region (UniProt Accession No. P01876) (SEQ ID NO: 20), Ig gamma-3 chain C region (UniProt Accession No. P01860) (SEQ ID NO: 18), Ig mu chain C region (UniProt Accession No. P01871) (SEQ ID NO: 19), Lumican (UniProt Accession No. P51884) (SEQ ID NO: 69), Serum paraoxonase/arylesterase 1 (UniProt Accession No. P27169) (SEQ ID NO: 65), Plasma protease C1 inhibitor (UniProt Accession No. P05155) (SEQ ID NO: 48), Vitronectin (UniProt Accession No. P04004) (SEQ ID NO:), von Willebrand factor (UniProt Accession No. P04275) (SEQ ID NO: 45), or combinations thereof. In some embodiments, the one or more proteins are biomarkers for one or more diseases or combination thereof. In some embodiments, the disease is cardiovascular disease. In some embodiments, the disease is cardiovascular disease and the proteins are any one or more of Angiotensinogen (UniProt Accession No. P01019) (SEQ ID NO: 14), Apolipoprotein A-I (UniProt Accession No. P02647) (SEQ ID NO: 21), Apolipoprotein B-100 (UniProt Accession No. P04114) (SEQ ID NO: 43), Apolipoprotein E (UniProt Accession No. P02649) (SEQ ID NO: 22), Complement C3 (UniProt Accession No. P01024) (SEQ ID NO: 16), Complement C4-A (UniProt Accession No. P0C0L4) (SEQ ID NO: 59), Complement C5 (UniProt Accession No. P01031) (SEQ ID NO: 17), Clusterin (UniProt Accession No. P10909) (SEQ ID NO: 61), C-reactive protein (UniProt Accession No. P02741) (SEQ ID NO: 28), Coagulation factor X (UniProt Accession No. P00742) (SEQ ID NO: 7), Coagulation factor XII (UniProt Accession No. P00748) (SEQ ID NO: 9), Prothrombin (UniProt Accession No. P00734) (SEQ ID NO: 4), Gelsolin (UniProt Accession No. P06396) (SEQ ID NO: 51), Integrin alpha-Iib (UniProt Accession No. P08514) (SEQ ID NO: 54), Apolipoprotein(a) (UniProt Accession No. P08519) (SEQ ID NO: 55), Plasminogen (UniProt Accession No. P00747) (SEQ ID NO: 8), Serum paraoxonase/arylesterase 1 (UniProt Accession No. P27169) (SEQ ID NO: 65), Antithrombin-III (UniProt Accession No. P01008) (SEQ ID NO: 11), Plasma protease C1 inhibitor (UniProt Accession No. P05155) (SEQ ID NO: 48), von Willebrand factor (UniProt Accession No. P04275) (SEQ ID NO: 45), or combinations thereof. In some embodiments, the disease is cardiovascular disease and the proteins are any one or more of Angiotensinogen (UniProt Accession No. P01019) (SEQ ID NO: 14), Apolipoprotein A-I (UniProt Accession No. P02647) ((SEQ ID NO: 21), Apolipoprotein B-100 (UniProt Accession No. P04114) (SEQ ID NO: 43), Apolipoprotein E (UniProt Accession No. P02649) (SEQ ID NO: 22), Complement C3 (UniProt Accession No. P01024) (SEQ ID NO: 16), Complement C4-A (UniProt Accession No. P0C0L4) (SEQ ID NO: 59), Complement C4-B (UniProt Accession No. P0C0L5) (SEQ ID NO: 60), Complement C5 (UniProt Accession No. P01031) (SEQ ID NO: 17), Clusterin (UniProt Accession No. P10909) (SEQ ID NO: 61), C-reactive protein (UniProt Accession No. P02741) (SEQ ID NO: 28), Coagulation factor X (UniProt Accession No. P00742) (SEQ ID NO: 7), Coagulation factor XII (UniProt Accession No. P00748) (SEQ ID NO: 9), Prothrombin (UniProt Accession No. P00734) (SEQ ID NO: 4), Gelsolin (UniProt Accession No. P06396) (SEQ ID NO: 51), Integrin alpha-Iib (UniProt Accession No. P08514) (SEQ ID NO: 54), Apolipoprotein(a) (UniProt Accession No. P08519) (SEQ ID NO: 55), Plasminogen (UniProt Accession No. P00747) (SEQ ID NO: 8), Serum paraoxonase/arylesterase 1 (UniProt Accession No. P27169) (SEQ ID NO: 65), Antithrombin-III (UniProt Accession No. P01008) (SEQ ID NO: 11), Alpha-2-antiplasmin (UniProt Accession No. P08697) (SEQ ID NO: 57), Plasma protease C1 inhibitor (UniProt Accession No. P05155) (SEQ ID NO: 48), von Willebrand factor (UniProt Accession No. P04275) (SEQ ID NO: 45), or combinations thereof. In some embodiments, the cardiovascular disease is selected from congestive heart failure, arrhythmia, pericarditis, acute myocardial infarction, infarcted myocardium, coronary artery disease, coronary heart disease, ischemic heart disease, cardiomyopathy, stroke, hypertensive heart disease, heart failure, pulmonary heart disease, ischemic syndrome, coronary microvascular disease, cardiac dysrhythmias, rheumatic heart disease, aortic aneurysms, cardiomyopathy, atrial fibrillation, congenital heart disease, endocarditis, inflammatory heart disease, inflammatory cardiomegaly, myocarditis, valvular heart disease, cerebrovascular disease, peripheral artery disease or any combination thereof. In some embodiments, the disease is atherosclerosis and the proteins are any one or more of Angiotensinogen (UniProt Accession No. P01019) (SEQ ID NO: 14), Alpha-2-HS-glycoprotein (UniProt Accession No. P02765) (SEQ ID NO: 35), Apolipoprotein A-I (UniProt Accession No. P02647) (SEQ ID NO: 21), Apolipoprotein A-II (Uniprot Accession No. P02652) (SEQ ID NO: 23), Apolipoprotein A-IV (UniProt Accession No. P06727) (SEQ ID NO: 52), Apolipoprotein B-100 (UniProt Accession No. P04114) (SEQ ID NO: 43), Apolipoprotein C-I (UniProt Accession No. P02654) (SEQ ID NO: 24), Apolipoprotein C-II (UniProt Accession No. P02655) (SEQ ID NO: 25), Apolipoprotein (UniProt Accession No. P02656) (SEQ ID NO. 26), Apolipoprotein E (UniProt Accession No. P02649) (SEQ ID NO: 22), Complement C5 (UniProt Accession No. P01031) (SEQ ID NO: 17), Clusterin (UniProt Accession No. P10909) (SEQ ID NO: 61), C-reactive protein (UniProt Accession No. P02741) (SEQ ID NO: 28), Coagulation factor X (UniProt Accession No. P00742) (SEQ ID NO: 7), Prothrombin (UniProt Accession No. P00734) (SEQ ID NO: 4), Hemoglobin subunit alpha (UniProt Accession No. P69905) (SEQ ID NO: 70), Haptoglobin (UniProt Accession No. P00738) (SEQ ID NO: 6), Integrin alpha-Iib (UniProt Accession No. P08514) (SEQ ID NO: 54), Plasminogen (UniProt Accession No. P00747) (SEQ ID NO: 8), Serum paraoxonase/arylesterase 1 (UniProt Accession No. P27169) (SEQ ID NO: 65), Serum paraoxonase/lactonase 3 (UniProt Accession No. Q15166) (SEQ ID NO: 72), Peroxiredoxin-2 (UniProt Accession No. P32119) (SEQ ID NO: 66), Antithrombin-III (UniProt Accession No. P01008) (SEQ ID NO. 11), Heparin cofactor 2 (UniProt Accession No. P05546) (SEQ ID NO: 50), von Willebrand factor (UniProt Accession No. P04275) (SEQ ID NO: 45) or combinations thereof. In some embodiments, the disease is renal failure and the proteins are any one or more of Angiotensinogen (UniProt Accession No. P01019) (SEQ ID NO: 14), Serum albumin (UniProt Accession No. P02768) (SEQ ID NO: 36), Apolipoprotein B-100 (UniProt Accession No. P04114) (SEQ ID NO: 43), Complement C3 (UniProt Accession No. P01024) (SEQ ID NO: 16), Complement C4-A (UniProt Accession No. P0C0L4) (SEQ ID NO: 59), Complement C5 (UniProt Accession No. P01031) (SEQ ID NO: 17), Complement factor B (UniProt Accession No. P00751) (SEQ ID NO: 10), C-reactive protein (UniProt Accession No. P02741) (SEQ ID NO: 28), Coagulation factor X (UniProt Accession No. P00742) (SEQ ID NO: 7), Prothrombin (UniProt Accession No. P00734) (SEQ ID NO: 4), Hemoglobin subunit alpha (UniProt Accession No. P69905) (SEQ ID NO: 70), Antithrombin-III (UniProt Accession No. P01008) (SEQ ID NO: 11), Serotransferrin (UniProt Accession No. P02787) (SEQ ID NO: 38), or combinations thereof. In some embodiments, the disease is renal failure and the proteins are any one or more of Angiotensinogen (UniProt Accession No. P01019) (SEQ ID NO: 14), Serum albumin (UniProt Accession No. P02768) (SEQ ID NO: 36), Apolipoprotein B-100 (UniProt Accession No. P04114) (SEQ ID NO: 43), Complement C3 (UniProt Accession No. P01024) (SEQ ID NO: 16), Complement C4-A (UniProt Accession No. P0C0L4) (SEQ ID NO: 59), Complement C5 (UniProt Accession No. P01031) (SEQ ID NO: 17), Complement factor B (UniProt Accession No. P00751) (SEQ ID NO: 10), C-reactive protein (UniProt Accession No. P02741) (SEQ ID NO: 28), Coagulation factor X (UniProt Accession No. P00742) (SEQ ID NO: 7), Prothrombin (UniProt Accession No. P00734) (SEQ ID NO: 4), Hemoglobin subunit alpha (UniProt Accession No. P69905) (SEQ ID NO: 70), Antithrombin-III (UniProt Accession No. P01008) (SEQ ID NO: 11), Serotransferrin (UniProt Accession No. P02787) (SEQ ID NO: 38), or combinations thereof. In some embodiments, the disease is liver disease and the proteins are any one or more of Alpha-1B-glycoprotein (UniProt Accession No. P04217) (SEQ ID NO: 44), Alpha-2-macroglobulin (UniProt Accession No. P01023) (SEQ ID NO: 15), Afamin (UniProt Accession No. P43652) (SEQ ID NO: 68), Angiotensinogen (UniProt Accession No. P01019) (SEQ ID NO: 14), Alpha-2-HS-glycoprotein (UniProt Accession No. P02765) (SEQ ID NO: 35), Serum albumin (UniProt Accession No. P02768) (SEQ ID NO: 36), Protein AMBP (UniProt Accession No. P02760) (SEQ ID NO: 33), Apolipoprotein A-I (UniProt Accession No. P02647) (SEQ ID NO: 21), Apolipoprotein A-II (UniProt Accession No. P02652) (SEQ ID NO: 23), Apolipoprotein B-100 (UniProt Accession No. P04114) (SEQ ID NO: 43), Apolipoprotein C-I (UniProt Accession No. P02654) (SEQ ID NO: 24), Apolipoprotein E (UniProt Accession No. P02649) (SEQ ID NO: 22), Apolipoprotein L1 (UniProt Accession No. 014791) (SEQ ID NO: 1), Complement C1q subcomponent subunit C (UniProt Accession No. P02747) (SEQ ID NO: 30), Complement C1r subcomponent (UniProt Accession No. P00736) (SEQ ID NO: 5), Complement C1s subcomponent (UniProt Accession No. P09871) (SEQ ID NO: 58), Complement C3 (UniProt Accession No. P01024) (SEQ ID NO: 16), Complement C4-A (UniProt Accession No. P0C0L4) (SEQ ID NO: 59), Complement C4-B (UniProt Accession No. P0C0L5) (SEQ ID NO: 60), C4b-binding protein alpha chain (UniProt Accession No. P04003) (SEQ ID NO: 41), Complement C5 (UniProt Accession No. P01031) (SEQ ID NO: 17), Complement component C8 alpha chain (UniProt Accession No. P07357) (SEQ ID NO: 53), Complement component C9 (UniProt Accession No. P02748) (SEQ ID NO: 31), Complement factor B (UniProt Accession No. P00751) (SEQ ID NO: 10), Complement factor H (UniProt Accession No. P08603) (SEQ ID NO: 56), Clusterin (UniProt Accession No. P10909) (SEQ ID NO: 61), Ceruloplasmin (UniProt Accession No. P00450) (SEQ ID NO: 2), C-reactive protein (UniProt Accession No. P02741) (SEQ ID NO: 28), Coagulation factor X (UniProt Accession No. P00742) (SEQ ID NO: 7), Coagulation factor XII (UniProt Accession No. P00748) (SEQ ID NO: 9), Prothrombin (UniProt Accession No. P00734) (SEQ ID NO: 4), Fibrinogen (UniProt Accession No. P02671) (SEQ ID NO: 27), Vitamin D-binding protein (UniProt Accession No. P02774) (SEQ ID NO: 37), Gelsolin (UniProt Accession No. P06396) (SEQ ID NO: 51), Hemoglobin subunit alpha (UniProt Accession No. P69905) (SEQ ID NO: 70), Haptoglobin (UniProt Accession No. P0073 8) (SEQ ID NO: 6), Hemopexin (UniProt Accession No. P02790) (SEQ ID NO: 39), Integrin alpha-Iib (UniProt Accession No. P08514) (SEQ ID NO: 54), Inter-alpha-trypsin inhibitor heavy chain H1 (UniProt Accession No. P19827) (SEQ ID NO: 63), Inter-alpha-trypsin inhibitor heavy chain H2 (UniProt Accession No. P19823) (SEQ ID NO: 62), Inter-alpha-trypsin inhibitor heavy chain H4 (UniProt Accession No. Q14624) (SEQ ID NO: 71), Plasma kallikrein (UniProt Accession No. P03952) (SEQ ID NO: 40), Apolipoprotein(a) (UniProt Accession No. P08519) (SEQ ID NO: 55), Leucine-rich alpha-2-glycoprotein (UniProt Accession No. P02750) (SEQ ID NO: 32), Lumican (UniProt Accession No. P51884) (SEQ ID NO: 69), Alpha-1-acid glycoprotein 1 (UniProt Accession No. P02763) (SEQ ID NO: 34), Plasminogen (UniProt Accession No. P00747) (SEQ ID NO: 8), Serum paraoxonase/arylesterase 1 (UniProt Accession No. P27169) (SEQ ID NO: 65), Serum paraoxonase/lactonase 3 (UniProt Accession No. Q15166) (SEQ ID NO: 72), Peroxiredoxin-2 (UniProt Accession No. P32119) (SEQ ID NO: 66), Serum amyloid A-4 protein (UniProt Accession No. P35542) (SEQ ID NO: 67), Alpha-1-antitrypsin (UniProt Accession No. P01009) (SEQ ID NO: 12), Alpha-1-antichymotrypsin (UniProt Accession No. P01011) (SEQ ID NO: 13), Antithrombin-III (UniProt Accession No. P01008) (SEQ ID NO: 11), Heparin cofactor 2 (UniProt Accession No. P05546) (SEQ ID NO: 50), Plasma protease C1 inhibitor (UniProt Accession No. P05155) (SEQ ID NO: 48), Serotransferrin (UniProt Accession No. P02787) (SEQ ID NO: 38), Vitronectin (UniProt Accession No. P04004) (SEQ ID NO: 42), von Willebrand factor (UniProt Accession No. P04275) (SEQ ID NO: 45), or combinations thereof. In some embodiments, the disease is vascular disease and the proteins are any one or more of Angiotensinogen (UniProt Accession No. P01019) (SEQ ID NO: 14), Alpha-2-HS-glycoprotein (UniProt Accession No. P02765) (SEQ ID NO: 35), Apolipoprotein A-I UniProt Accession No. P02647) (SEQ ID NO: 21), Apolipoprotein A-II (UniProt Accession No.) (SEQ ID NO: 23), Apolipoprotein A-IV (UniProt Accession No. P06727) (SEQ ID NO: 52), Apolipoprotein B-100 (UniProt Accession No. P04114) (SEQ ID NO: 43), Apolipoprotein C-I (UniProt Accession No. P02654) (SEQ ID NO: 24), Apolipoprotein C-II (UniProt Accession No. P02655) (SEQ ID NO: 25), Apolipoprotein C-III (UniProt Accession No. P02656) (SEQ ID NO: 26), Apolipoprotein E (UniProt Accession No. P02649) (SEQ ID NO: 22), Complement C5 (UniProt Accession No. P01031) (SEQ ID NO: 17), Clusterin (UniProt Accession No. P10909) (SEQ ID NO: 61), C-reactive protein (UniProt Accession No. P02741) (SEQ ID NO: 28), Coagulation factor X (UniProt Accession No. P00742) (SEQ ID NO: 7), Prothrombin (UniProt Accession No. P00734) (SEQ ID NO: 4), Hemoglobin subunit alpha (UniProt Accession No. P69905) (SEQ ID NO: 70), Haptoglobin (UniProt Accession No. P00738) (SEQ ID NO: 6), Integrin alpha-Iib (UniProt Accession No. P08514) (SEQ ID NO: 54), Apolipoprotein(a) (UniProt Accession No. P08519) (SEQ ID NO: 55), Plasminogen (UniProt Accession No. P00747) (SEQ ID NO: 8), Serum paraoxonase/arylesterase 1 (UniProt Accession No. P27169) (SEQ ID NO: 65), Serum paraoxonase/lactonase 3 (UniProt Accession No. Q15166) (SEQ ID NO: 72), Peroxiredoxin-2 (UniProt Accession No. P32119) (SEQ ID NO: 66), Antithrombin-III (UniProt Accession No. P01008) (SEQ ID NO: 11), Heparin cofactor 2 (UniProt Accession No. P05546) (SEQ ID NO: 50), von Willebrand factor (UniProt Accession No. P04275) (SEQ ID NO: 45), or combinations thereof. In some embodiments, the disease is lung damage and the proteins are any one or more of Alpha-2-HS-glycoprotein (UniProt Accession No. P02765) (SEQ ID NO: 35), Serum albumin (UniProt Accession No. P02768) (SEQ ID NO: 36), Protein AMBP (UniProt Accession No. P02760) (SEQ ID NO: 33), Zinc-alpha-2-glycoprotein (UniProt Accession No. P25311) (SEQ ID NO: 64), Complement C3 (UniProt Accession No. P01024) (SEQ ID NO: 16), Complement C5 (UniProt Accession No. P01031) (SEQ ID NO: 17), Complement factor B (UniProt Accession No. P00751) (SEQ ID NO: 10), Clusterin (UniProt Accession No. P10909) (SEQ ID NO: 61), Vitamin D-binding protein (UniProt Accession No. P02774) (SEQ ID NO: 37), Hemoglobin subunit alpha (UniProt Accession No. P69905) (SEQ ID NO: 70), Plasma protease C1 inhibitor (UniProt Accession No. P05155) (SEQ ID NO; 48), Serotransferrin (UniProt Accession No. P02787) (SEQ ID NO: 38), von Willebrand factor (UniProt Accession No. P04275) (SEQ ID NO: 45), or combinations thereof. In some embodiments, the disease is lung damage and the proteins are any one or more of Alpha-2-HS-glycoprotein (UniProt Accession No. P02765) (SEQ ID NO: 35), Serum albumin (UniProt Accession No. P02768) (SEQ ID NO: 36), Protein AMBP (UniProt Accession No. P02760) (SEQ ID NO: 33), Zinc-alpha-2-glycoprotein (UniProt Accession No. P25311) (SEQ ID NO: 64), Complement C3 (UniProt Accession No. P01024) (SEQ ID NO: 16), Complement C5 (UniProt Accession No. P01031) (SEQ ID NO: 17), Complement factor B (UniProt Accession No. P00751) (SEQ ID NO: 10), Clusterin (UniProt Accession No. P10909) (SEQ ID NO: 61), C-reactive protein (UniProt Accession No. P02741) (SEQ ID NO: 28), Coagulation factor XII (UniProt Accession No. P00748 (SEQ ID NO: 9) Vitamin D-binding protein (UniProt Accession No. P02774) (SEQ ID NO: 37), Hemoglobin subunit alpha (UniProt Accession No. P69905) (SEQ ID NO: 70), Plasma protease C1 inhibitor (UniProt Accession No. P05155) (SEQ ID NO; 48), Serotransferrin (UniProt Accession No. P02787) (SEQ ID NO: 38), von Willebrand factor (UniProt Accession No. P04275) (SEQ ID NO: 45), or combinations thereof.

[0016] In various embodiments, the present invention provides a method for obtaining a protein biomarker signature for a subject, the method comprising: obtaining a sample from the subject; contacting the sample with one or more proteases so as to obtain a digested sample, wherein the digested sample comprises one or more peptides; analyzing the digested sample by mass spectrometry so as to obtain mass spectrometry data; correlating the mass spectrometry data to the one or more peptides; and correlating the one or more peptides to one or more proteins so as to obtain the protein biomarker signature for the subject, wherein the one or more proteins are listed in Table 15. In some embodiments, the mass spectrometry is selected reaction monitoring (SRM) mass spectrometry or multiple reaction monitoring (MRM) mass spectrometry. In some embodiments, the one or more peptides are correlated to the one or more proteins according to Table 5. In some embodiments, the mass spectrometry data comprises one or more Q1/Q3 mass value pairs, wherein the Q1/Q3 mass value pairs are correlated to the one or more peptides, and the one or more peptides are correlated to the one or more proteins according to Table 5. In some embodiments, the one or more peptides are correlated to the one or more proteins according to Table 7. In some embodiments, the mass spectrometry data comprises one or more precursor ions and one or more product ions, wherein the precursor ions and the product ions are correlated to the one or more peptides, and the one or more peptides are correlated to the one or more proteins according to Table 7. In some embodiments, the one or more peptides are correlated to the one or more proteins according to Table 8. In some embodiments, the mass spectrometry data comprises one or more precursor ions and one or more product ions, wherein the precursor ions and the product ions are correlated to the one or more peptides, and the one or more peptides are correlated to the one or more proteins according to Table 8. In some embodiments, the mass spectrometry is parallel reaction monitoring (PRM) mass spectrometry. In some embodiments, the one or more peptides are correlated to the one or more proteins according to Table 9. In some embodiments, the mass spectrometry data comprises one or more precursor ions and one or more product ions, wherein the precursor ions and the product ions are correlated to the one or more peptides, and the one or more peptides are correlated to the one or more proteins according to Table 9. In some embodiments, the one or more peptides are correlated to the one or more proteins according to Table 10. In some embodiments, the mass spectrometry data comprises one or more precursor ions and one or more product ions, wherein the precursor ions and the product ions are correlated to the one or more peptides, and the one or more peptides are correlated to the one or more proteins according to Table 10. In some embodiments, the mass spectrometry is data dependent acquisition (DDA) mass spectrometry. In some embodiments, the one or more peptides are correlated to the one or more proteins according to Table 11. In some embodiments, the mass spectrometry data comprises one or more precursor ions, wherein the precursor ions are correlated to the one or more peptides, and the one or more peptides are correlated to the one or more proteins according to Table 11. In some embodiments, the one or more peptides are correlated to the one or more proteins according to Table 12. In some embodiments, the mass spectrometry data comprises one or more precursor ions and one or more product ions, wherein the precursor ions and the product ions are correlated to the one or more peptides, and the one or more peptides are correlated to the one or more proteins according to Table 12. In some embodiments, the mass spectrometry is data independent acquisition (DIA) mass spectrometry. In some embodiments, the one or more peptides are correlated to the one or more proteins according to Table 13. In some embodiments, the the mass spectrometry data comprises one or more precursor ions and one or more product ions, wherein the precursor ions and the product ions are correlated to the one or more peptides, and the one or more peptides are correlated to the one or more proteins according to Table 13. In some embodiments, the one or more peptides are correlated to the one or more proteins according to Table 14. In some embodiments, the mass spectrometry data comprises one or more precursor ions and one or more product ions, wherein the precursor ions and the product ions are correlated to the one or more peptides, and the one or more peptides are correlated to the one or more proteins according to Table 14. In some embodiments, the one or more proteins are biomarkers for one or more functions or combination thereof. In some embodiments, the functions are inflammatory response, lipid metabolism, redox signaling, immune response, or endothelial dysfunction. In some embodiments, the functions are lipid metabolism, immune response, coagulation, inflammatory response, or redox signaling. In some embodiments, the function is inflammatory response and the proteins are any one or more of Alpha-2-macroglobulin (UniProt Accession No. P01023) (SEQ ID NO: 15), Angiotensinogen (UniProt Accession No. P01019) (SEQ ID NO: 14), Alpha-2-HS-glycoprotein (UniProt Accession No. P02765) (SEQ ID NO: 35), Apolipoprotein A-I (UniProt Accession No. P02647) (SEQ ID NO: 21), Apolipoprotein E (UniProt Accession No. P02649) (SEQ ID NO: 22), Complement C3 (UniProt Accession No. P01024) (SEQ ID NO: 16), Complement C5 (UniProt Accession No. P01031) (SEQ ID NO: 17), Complement factor H (UniProt Accession No. P08603) (SEQ ID NO: 56), C-reactive protein (UniProt Accession No. P02741) (SEQ ID NO: 28), Coagulation factor XII (UniProt Accession No. P00748) (SEQ ID NO: 9), Prothrombin (UniProt Accession No. P00734) (SEQ ID NO: 4), Vitamin D-binding protein (UniProt Accession No. P02774) (SEQ ID NO: 37), Gelsolin (UniProt Accession No. P06396) (SEQ ID NO: 51), Haptoglobin (UniProt Accession No. P00738) (SEQ ID NO: 6), Ig mu chain C region (UniProt Accession No. P01871) (SEQ ID NO: 19), Plasma kallikrein (UniProt Accession No. P03952) (SEQ ID NO: 40), Apolipoprotein(a) (UniProt Accession No. P08519) (SEQ ID NO: 55), Lumican (UniProt Accession No. P51884) (SEQ ID NO: 69), Alpha-1-acid glycoprotein 1 (UniProt Accession No. P02763) (SEQ ID NO: 34), Plasminogen (UniProt Accession No. P00747) (SEQ ID NO: 8), Serum paraoxonase/arylesterase 1 (UniProt Accession No. P27169) (SEQ ID NO: 65), Alpha-1-antitrypsin (UniProt Accession No. P01009) (SEQ ID NO: 12), Alpha-1-antichymotrypsin (UniProt Accession No. P01011) (SEQ ID NO: 13), Plasma protease C1 inhibitor (UniProt Accession No. P05155) (SEQ ID NO: 48), Vitronectin (UniProt Accession No. P04004) (SEQ ID NO: 42) or combinations thereof. In some embodiments, the function is lipid metabolism and the proteins are any one or more of Angiotensinogen (UniProt Accession No. P01019) (SEQ ID NO: 14), Alpha-2-HS-glycoprotein (UnitProt Accession No. P02765) (SEQ ID NO: 35), Serum albumin (UniProt Accession No. P02768) (SEQ ID NO: 36), Apolipoprotein A-I (UniProt Accession No. P02647) (SEQ ID NO: 21), Apolipoprotein A-II (UniProt Accession No. P02652) (SEQ ID NO: 23), Apolipoprotein A-IV (UniProt Accession No. P06727) (SEQ ID NO: 52), Apolipoprotein B-100 (UniProt Accession No. P04114) (SEQ ID NO: 43), Apolipoprotein C-I (UniProt Accession No. P02654) (SEQ ID NO: 24), Apolipoprotein C-III (UniProt Accession No. P02656) (SEQ ID NO: 26), Apolipoprotein E (UniProt Accession No. P02649) (SEQ ID NO: 22), Complement C3 (UniProt Accession No. P01024) (SEQ ID NO: 16), Complement C5 (UniProt Accession No. P01031) (SEQ ID NO: 17), Complement factor B (UniProt Accession No. P00751) (SEQ ID NO: 10), Complement factor H (UniProt Accession No. P08603) (SEQ ID NO: 56), Clusterin (UniProt Accession No. P10909) (SEQ ID NO: 61), C-reactive protein (UniProt Accession No. P02741) (SEQ ID NO: 28), Prothrombin (UniProt Accession No. P00734) (SEQ ID NO: 4), Vitamin D-binding protein (UniProt Accession No. P02774) (SEQ ID NO: 37), Haptoglobin (UniProt Accession No. P00738) (SEQ ID NO. 6), Plasma kallikrein (UniProt Accession No. P03952) (SEQ ID NO: 40), Apolipoprotein(a) (UniProt Accession No. P08519) (SEQ ID NO: 55), Plasminogen (UniProt Accession No. P00747) (SEQ ID NO: 8), Serum paraoxonase/arylesterase 1 (UniProt Accession No. P27169) (SEQ ID NO: 65), Serum paraoxonase/lactonase 3 (UniProt Accession No. Q15166) (SEQ ID NO: 72), sex hormone binding globulin (UniProt Accession No. P04278) (SEQ ID NO: 46) or combinations thereof. In some embodiments, the function is redox signaling and the proteins are any one or more of Angiotensinogen (UniProt Accession No. P01019) (SEQ ID NO: 14), Serum albumin (UniProt Accession No. P02768) (SEQ ID NO: 36), Apolipoprotein A-I (UniProt Accession No. P02647) (SEQ ID NO: 21), Apolipoprotein A-IV (UniProt Accession No. P06727) (SEQ ID NO: 52), Apolipoprotein C-II (UniProt Accession No. P02655) (SEQ ID NO: 25), Apolipoprotein E (UniProt Accession No. P02649) (SEQ ID NO: 22), Complement C3 (UniProt Accession No. P01024) (SEQ ID NO: 16), Complement C5 (UniProt Accession No. P01031) (SEQ ID NO: 17), Complement factor B (UniProt Accession No. P00751) (SEQ ID NO: 10), Complement factor H (UniProt Accession No. P08603) (SEQ ID NO: 56), C-reactive protein (UniProt Accession No. P02741) (SEQ ID NO: 28), Prothrombin (UniProt Accession No. P00734) (SEQ ID NO: 4), Gelsolin (UniProt Accession No. P06396) (SEQ ID NO: 51), Hemoglobin subunit alpha (UniProt Accession No. P69905) (SEQ ID NO: 70), Haptoglobin (UniProt Accession No. P00738) (SEQ ID NO: 6), Inter-alpha-trypsin inhibitor heavy chain H4 (UniProt Accession No. Q14624) (SEQ ID NO: 71), Serum paraoxonase/lactonase 3 (UniProt Accession No. Q15166) (SEQ ID NO: 72), Peroxiredoxin-2 (UniProt Accession No. P32119) (SEQ ID NO: 66), Alpha-1-antitrypsin (UniProt Accession No. P01009) (SEQ ID NO: 12), Alpha-1-antichymotrypsin (UniProt Accession No. P01011) (SEQ ID NO: 13), Serotransferrin (UniProt Accession No. P02787) (SEQ ID NO: 38), or combinations thereof. In some embodiments, the function is immune response and the proteins are any one or more of Complement C1q subcomponent subunit B (UniProt Accession No. P02746) (SEQ ID NO: 29), Complement C1q subcomponent subunit C (UniProt Accession No. P02747) (SEQ ID NO: 30), Complement C1r subcomponent (UniProt Accession No. P00736) (SEQ ID NO: 50), Complement C1s subcomponent (UniProt Accession No. P09871) (SEQ ID NO: 58), Complement C3 (UniProt Accession No. P01024) (SEQ ID NO: 16), Complement C4-A (UniProt Accession No. P0C0L4) (SEQ ID NO: 59), Complement C5 (UniProt Accession No. P01031) (SEQ ID NO: 17), Complement component C8 alpha chain (UniProt Accession No. P07357) (SEQ ID NO: 53), Complement component C9 (UniProt Accession No. P02748) (SEQ ID NO: 31), Complement factor B (UniProt Accession No. P00751) (SEQ ID NO: 10), Plasma protease C1 inhibitor (UniProt Accession No. P05155) (SEQ ID NO: 48), or combinations thereof. In some embodiments, the function is endothelial dysfunction and the proteins are any one or more of Angiotensinogen (UniProt Accession No. P01019) (SEQ ID NO: 14), C-reactive protein (UniProt Accession No. P02741) (SEQ ID NO: 28), Lumican (UniProt Accession No. P51884) (SEQ ID NO: 69), Plasminogen (UniProt Accession No. P00747) (SEQ ID NO: 8), Peroxiredoxin-2 (UniProt Accession No. P32119) (SEQ ID NO: 66), Alpha-1-antitrypsin (UniProt Accession No. P01009) (SEQ ID NO: 12), Alpha-1-antichymotrypsin (UniProt Accession No. P01011) (SEQ ID NO: 13), Antithrombin-III (UniProt Accession No. P01008) (SEQ ID NO: 11), or combinations thereof. In some embodiments, the function is coagulation and the proteins are any one or more of Serum albumin (UniProt Accession No. P02768) (SEQ ID NO: 36), Apolipoprotein E (UniProt Accession No. P02649) (SEQ ID NO: 22), Complement C3 (UniProt Accession No. P01024) (SEQ ID NO: 16), Complement C4-A (UniProt Accession No. P0C0L4) (SEQ ID NO: 59), Complement C4-B (UniProt Accession No. P0C0L5) (SEQ ID NO: 60), Complement C5 (UniProt Accession No. P01031) (SEQ ID NO: 17), Complement component C9 (UniProt Accession No. P02748) (SEQ ID NO: 31), Complement factor B (UniProt Accession No. P00751) (SEQ ID NO: 10), Complement factor H (UniProt Accession No.) (SEQ ID NO: 56), C-reactive protein (UniProt Accession No. P02741) (SEQ ID NO: 28), Coagulation factor X (UniProt Accession No. P00742) (SEQ ID NO: 7), Coagulation factor XII (UniProt Accession No. P00748) (SEQ ID NO: 9), Prothrombin (UniProt Accession No. P00734) (SEQ ID NO: 4), Fibrinogen (UniProt Accession No. P02671) (SEQ ID NO: 27), Haptoglobin (UniProt Accession No. P00738) (SEQ ID NO: 6), Integrin alpha-Iib (UniProt Accession No. P08514) (SEQ ID NO: 54), Plasma kallikrein (UniProt Accession No. P03952) (SEQ ID NO: 40), Apolipoprotein(a) (UniProt Accession No. P08519) (SEQ ID NO: 55), Plasminogen (UniProt Accession No. P00747) (SEQ ID NO: 8), Serum paraoxonase/arylesterase 1 (UniProt Accession No. P27169) (SEQ ID NO: 65), Peroxiredoxin-2 (UniProt Accession No. P32119) (SEQ ID NO: 66), Plasma serine protease inhibitor (UniProt Accession No. P05154) (SEQ ID NO: 47), Antithrombin-III (UniProt Accession No. P01008) (SEQ ID NO: 11), Heparin cofactor 2 (UniProt Accession No. P05546) (SEQ ID NO: 50), Alpha-2-antiplasmin (UniProt Accession No. P08697) (SEQ ID NO: 57), Vitronectin (UniProt Accession No. P04004) (SEQ ID NO: 42), von Willebrand factor (UniProt Accession No. P04275) (SEQ ID NO: 45), or combinations thereof. In some embodiments, the function is lipid metabolism and the proteins are any one or more of Angiotensinogen (UniProt Accession No. P01019) (SEQ ID NO: 14), Alpha-2-HS-glycoprotein (UnitProt Accession No. P02765) (SEQ ID NO: 35), Serum albumin (UniProt Accession No. P02768) (SEQ ID NO: 36), Apolipoprotein A-I (UniProt Accession No. P02647) (SEQ ID NO: 21), Apolipoprotein A-II (UniProt Accession No. P02652) (SEQ ID NO: 23), Apolipoprotein A-IV (UniProt Accession No. P06727) (SEQ ID NO: 52), Apolipoprotein B-100 (UniProt Accession No. P04114) (SEQ ID NO: 43), Apolipoprotein C-I (UniProt Accession No. P02654) (SEQ ID NO: 24), Apolipoprotein C-III (UniProt Accession No. P02656) (SEQ ID NO: 26), Apolipoprotein E (UniProt Accession No. P02649) (SEQ ID NO: 22), Zinc-alpha-2-glycoprotein (UniProt Accession No. P25311) (SEQ ID NO: 64), Complement C3 (UniProt Accession No. P01024) (SEQ ID NO: 16), Complement C5 (UniProt Accession No. P01031) (SEQ ID NO: 17), Complement factor B (UniProt Accession No. P00751) (SEQ ID NO: 10), Complement factor H (UniProt Accession No. P08603) (SEQ ID NO: 56), Clusterin (UniProt Accession No. P10909) (SEQ ID NO: 61), C-reactive protein (UniProt Accession No. P02741) (SEQ ID NO: 28), Prothrombin (UniProt Accession No. P00734) (SEQ ID NO: 4), Vitamin D-binding protein (UniProt Accession No. P02774) (SEQ ID NO: 37), Haptoglobin (UniProt Accession No. P00738) (SEQ ID NO. 6), Plasma kallikrein (UniProt Accession No. P03952) (SEQ ID NO: 40), Apolipoprotein(a) (UniProt Accession No. P08519) (SEQ ID NO: 55), Plasminogen (UniProt Accession No. P00747) (SEQ ID NO: 8), Serum paraoxonase/arylesterase 1 (UniProt Accession No. P27169) (SEQ ID NO: 65), Serum paraoxonase/lactonase 3 (UniProt Accession No. Q15166) (SEQ ID NO: 72), Alpha-1-antitrypsin (UniProt Accession No. P01009) (SEQ ID NO: 12), sex hormone binding globulin (UniProt Accession No. P04278) (SEQ ID NO: 46) or combinations thereof. In some embodiments, the function is inflammatory response and the proteins are any one or more of Alpha-2-macroglobulin (UniProt Accession No. P01023) (SEQ ID NO: 15), Angiotensinogen (UniProt Accession No. P01019) (SEQ ID NO: 14), Alpha-2-HS-glycoprotein (UniProt Accession No. P02765) (SEQ ID NO: 35), Apolipoprotein A-I (UniProt Accession No. P02647) (SEQ ID NO: 21), Apolipoprotein E (UniProt Accession No. P02649) (SEQ ID NO: 22), Complement C3 (UniProt Accession No. P01024) (SEQ ID NO: 16), Complement C5 (UniProt Accession No. P01031) (SEQ ID NO: 17), Complement factor H (UniProt Accession No. P08603) (SEQ ID NO: 56), C-reactive protein (UniProt Accession No. P02741) (SEQ ID NO: 28), C-reactive protein (UniProt Accession No. P02741) (SEQ ID NO: 28), Coagulation factor XII (UniProt Accession No. P00748) (SEQ ID NO: 9), Prothrombin (UniProt Accession No. P00734) (SEQ ID NO: 4), Vitamin D-binding protein (UniProt Accession No. P02774) (SEQ ID NO: 37), Gelsolin (UniProt Accession No. P06396) (SEQ ID NO: 51), Haptoglobin (UniProt Accession No. P00738) (SEQ ID NO: 6), Ig mu chain C region (UniProt Accession No. P01871) (SEQ ID NO: 19), Plasma kallikrein (UniProt Accession No. P03952) (SEQ ID NO: 40), Apolipoprotein(a) (UniProt Accession No. P08519) (SEQ ID NO: 55), Lumican (UniProt Accession No. P51884) (SEQ ID NO: 69), Alpha-1-acid glycoprotein 1 (UniProt Accession No. P02763) (SEQ ID NO: 34), Plasminogen (UniProt Accession No. P00747) (SEQ ID NO: 8), Serum paraoxonase/arylesterase 1 (UniProt Accession No. P27169) (SEQ ID NO: 65), Alpha-1-antitrypsin (UniProt Accession No. P01009) (SEQ ID NO: 12), Alpha-1-antichymotrypsin (UniProt Accession No. P01011) (SEQ ID NO: 13), Plasma protease C1 inhibitor (UniProt Accession No. P05155) (SEQ ID NO: 48), Vitronectin (UniProt Accession No. P04004) (SEQ ID NO: 42) or combinations thereof. In some embodiments, the function is immune response and the proteins are any one or more of Angiotensinogen (UniProt Accession No. P01019) (SEQ ID NO: 14), Alpha-2-HS-glycoprotein (UniProt Accession No. P02765) (SEQ ID NO: 35), Apolipoprotein A-I (UniProt Accession No. P02647) (SEQ ID NO: 21), Apolipoprotein A-II (UniProt Accession No. P02652) (SEQ ID NO: 23), Apolipoprotein E (UniProt Accession No. P02649) (SEQ ID NO: 22), Complement C1q subcomponent subunit B (UniProt Accession No. P02746) (SEQ ID NO: 29), Complement C1q subcomponent subunit C (UniProt Accession No. P02747) (SEQ ID NO: 30), Complement C1r subcomponent (UniProt Accession No. P00736) (SEQ ID NO: 50), Complement C1s subcomponent (UniProt Accession No. P09871) (SEQ ID NO: 58), Complement C3 (UniProt Accession No. P01024) (SEQ ID NO: 16), Complement C4-A (UniProt Accession No. P0C0L4) (SEQ ID NO: 59), Complement C4-B (UniProt Accession No. P0C0L5) (SEQ ID NO: 60), Complement C5 (UniProt Accession No. P01031) (SEQ ID NO: 17), Complement component C8 alpha chain (UniProt Accession No. P07357) (SEQ ID NO: 53), Complement component C9 (UniProt Accession No. P02748) (SEQ ID NO: 31), Complement factor B (UniProt Accession No. P00751) (SEQ ID NO: 10), Complement factor H (UniProt Accession No. P08603) (SEQ ID NO: 56), C-reactive protein (UniProt Accession No. P02741) (SEQ ID NO: 28), Coagulation factor X (UniProt Accession No. P00742) (SEQ ID NO: 7), Gelsolin (UniProt Accession No. P06396) (SEQ ID NO: 51), Ig alpha-1 chain C region (UniProt Accession No. P01876) (SEQ ID NO: 20), Ig gamma-3 chain C region (UniProt Accession No. P01860) (SEQ ID NO: 18), Ig mu chain C region (UniProt Accession No. P01871) (SEQ ID NO: 19), Lumican (UniProt Accession No. P51884) (SEQ ID NO: 69), Serum paraoxonase/arylesterase 1 (UniProt Accession No. P27169) (SEQ ID NO: 65), Plasma protease C1 inhibitor (UniProt Accession No. P05155) (SEQ ID NO: 48), Vitronectin (UniProt Accession No. P04004) (SEQ ID NO:), von Willebrand factor (UniProt Accession No. P04275) (SEQ ID NO: 45), or combinations thereof. In some embodiments, the one or more proteins are biomarkers for one or more diseases or combination thereof. In some embodiments, the disease is cardiovascular disease. In some embodiments, the disease is cardiovascular disease and the proteins are any one or more of Angiotensinogen (UniProt Accession No. P01019) (SEQ ID NO: 14), Apolipoprotein A-I (UniProt Accession No. P02647) (SEQ ID NO: 21), Apolipoprotein B-100 (UniProt Accession No. P04114) (SEQ ID NO: 43), Apolipoprotein E (UniProt Accession No. P02649) (SEQ ID NO: 22), Complement C3 (UniProt Accession No. P01024) (SEQ ID NO: 16), Complement C4-A (UniProt Accession No. P0C0L4) (SEQ ID NO: 59), Complement C5 (UniProt Accession No. P01031) (SEQ ID NO: 17), Clusterin (UniProt Accession No. P10909) (SEQ ID NO: 61), C-reactive protein (UniProt Accession No. P02741) (SEQ ID NO: 28), Coagulation factor X (UniProt Accession No. P00742) (SEQ ID NO: 7), Coagulation factor XII (UniProt Accession No. P00748) (SEQ ID NO: 9), Prothrombin (UniProt Accession No. P00734) (SEQ ID NO: 4), Gelsolin (UniProt Accession No. P06396) (SEQ ID NO: 51), Integrin alpha-Iib (UniProt Accession No. P08514) (SEQ ID NO: 54), Apolipoprotein(a) (UniProt Accession No. P08519) (SEQ ID NO: 55), Plasminogen (UniProt Accession No. P00747) (SEQ ID NO: 8), Serum paraoxonase/arylesterase 1 (UniProt Accession No. P27169) (SEQ ID NO: 65), Antithrombin-III (UniProt Accession No. P01008) (SEQ ID NO: 11), Plasma protease C1 inhibitor (UniProt Accession No. P05155) (SEQ ID NO: 48), von Willebrand factor (UniProt Accession No. P04275) (SEQ ID NO: 45), or combinations thereof. In some embodiments, the disease is cardiovascular disease and the proteins are any one or more of Angiotensinogen (UniProt Accession No. P01019) (SEQ ID NO: 14), Apolipoprotein A-I (UniProt Accession No. P02647) ((SEQ ID NO: 21), Apolipoprotein B-100 (UniProt Accession No. P04114) (SEQ ID NO: 43), Apolipoprotein E (UniProt Accession No. P02649) (SEQ ID NO: 22), Complement C3 (UniProt Accession No. P01024) (SEQ ID NO: 16), Complement C4-A (UniProt Accession No. P0C0L4) (SEQ ID NO: 59), Complement C4-B (UniProt Accession No. P0C0L5) (SEQ ID NO: 60), Complement C5 (UniProt Accession No. P01031) (SEQ ID NO: 17), Clusterin (UniProt Accession No. P10909) (SEQ ID NO: 61), C-reactive protein (UniProt Accession No. P02741) (SEQ ID NO: 28), Coagulation factor X (UniProt Accession No. P00742) (SEQ ID NO: 7), Coagulation factor XII (UniProt Accession No. P00748) (SEQ ID NO: 9), Prothrombin (UniProt Accession No. P00734) (SEQ ID NO: 4), Gelsolin (UniProt Accession No. P06396) (SEQ ID NO: 51), Integrin alpha-Iib (UniProt Accession No. P08514) (SEQ ID NO: 54), Apolipoprotein(a) (UniProt Accession No. P08519) (SEQ ID NO: 55), Plasminogen (UniProt Accession No. P00747) (SEQ ID NO: 8), Serum paraoxonase/arylesterase 1 (UniProt Accession No. P27169) (SEQ ID NO: 65), Antithrombin-III (UniProt Accession No. P01008) (SEQ ID NO: 11), Alpha-2-antiplasmin (UniProt Accession No. P08697) (SEQ ID NO: 57), Plasma protease C1 inhibitor (UniProt Accession No. P05155) (SEQ ID NO: 48), von Willebrand factor (UniProt Accession No. P04275) (SEQ ID NO: 45), or combinations thereof. In some embodiments, the cardiovascular disease is selected from congestive heart failure, arrhythmia, pericarditis, acute myocardial infarction, infarcted myocardium, coronary artery disease, coronary heart disease, ischemic heart disease, cardiomyopathy, stroke, hypertensive heart disease, heart failure, pulmonary heart disease, ischemic syndrome, coronary microvascular disease, cardiac dysrhythmias, rheumatic heart disease, aortic aneurysms, cardiomyopathy, atrial fibrillation, congenital heart disease, endocarditis, inflammatory heart disease, inflammatory cardiomegaly, myocarditis, valvular heart disease, cerebrovascular disease, peripheral artery disease or any combination thereof. In some embodiments, the disease is atherosclerosis and the proteins are any one or more of Angiotensinogen (UniProt Accession No. P01019) (SEQ ID NO: 14), Alpha-2-HS-glycoprotein (UniProt Accession No. P02765) (SEQ ID NO: 35), Apolipoprotein A-I (UniProt Accession No. P02647) (SEQ ID NO: 21), Apolipoprotein A-II (Uniprot Accession No. P02652) (SEQ ID NO: 23), Apolipoprotein A-IV (UniProt Accession No. P06727) (SEQ ID NO: 52), Apolipoprotein B-100 (UniProt Accession No. P04114) (SEQ ID NO: 43), Apolipoprotein C-I (UniProt Accession No. P02654) (SEQ ID NO: 24), Apolipoprotein C-II (UniProt Accession No. P02655) (SEQ ID NO: 25), Apolipoprotein (UniProt Accession No. P02656) (SEQ ID NO. 26), Apolipoprotein E (UniProt Accession No. P02649) (SEQ ID NO: 22), Complement C5 (UniProt Accession No. P01031) (SEQ ID NO: 17), Clusterin (UniProt Accession No. P10909) (SEQ ID NO: 61), C-reactive protein (UniProt Accession No. P02741) (SEQ ID NO: 28), Coagulation factor X (UniProt Accession No. P00742) (SEQ ID NO: 7), Prothrombin (UniProt Accession No. P00734) (SEQ ID NO: 4), Hemoglobin subunit alpha (UniProt Accession No. P69905) (SEQ ID NO: 70), Haptoglobin (UniProt Accession No. P00738) (SEQ ID NO: 6), Integrin alpha-Iib (UniProt Accession No. P08514) (SEQ ID NO: 54), Plasminogen (UniProt Accession No. P00747) (SEQ ID NO: 8), Serum paraoxonase/arylesterase 1 (UniProt Accession No. P27169) (SEQ ID NO: 65), Serum paraoxonase/lactonase 3 (UniProt Accession No. Q15166) (SEQ ID NO: 72), Peroxiredoxin-2 (UniProt Accession No. P32119) (SEQ ID NO: 66), Antithrombin-III (UniProt Accession No. P01008) (SEQ ID NO. 11), Heparin cofactor 2 (UniProt Accession No. P05546) (SEQ ID NO: 50), von Willebrand factor (UniProt Accession No. P04275) (SEQ ID NO: 45) or combinations thereof. In some embodiments, the disease is renal failure and the proteins are any one or more of Angiotensinogen (UniProt Accession No. P01019) (SEQ ID NO: 14), Serum albumin (UniProt Accession No. P02768) (SEQ ID NO: 36), Apolipoprotein B-100 (UniProt Accession No. P04114) (SEQ ID NO: 43), Complement C3 (UniProt Accession No. P01024) (SEQ ID NO: 16), Complement C4-A (UniProt Accession No. P0C0L4) (SEQ ID NO: 59), Complement C5 (UniProt Accession No. P01031) (SEQ ID NO: 17), Complement factor B (UniProt Accession No. P00751) (SEQ ID NO: 10), C-reactive protein (UniProt Accession No. P02741) (SEQ ID NO: 28), Coagulation factor X (UniProt Accession No. P00742) (SEQ ID NO: 7), Prothrombin (UniProt Accession No. P00734) (SEQ ID NO: 4), Hemoglobin subunit alpha (UniProt Accession No. P69905) (SEQ ID NO: 70), Antithrombin-III (UniProt Accession No. P01008) (SEQ ID NO: 11), Serotransferrin (UniProt Accession No. P02787) (SEQ ID NO: 38), or combinations thereof. In some embodiments, the disease is renal failure and the proteins are any one or more of Angiotensinogen (UniProt Accession No. P01019) (SEQ ID NO: 14), Serum albumin (UniProt Accession No. P02768) (SEQ ID NO: 36), Apolipoprotein B-100 (UniProt Accession No. P04114) (SEQ ID NO: 43), Complement C3 (UniProt Accession No. P01024) (SEQ ID NO: 16), Complement C4-A (UniProt Accession No. P0C0L4) (SEQ ID NO: 59), Complement C5 (UniProt Accession No. P01031) (SEQ ID NO: 17), Complement factor B (UniProt Accession No. P00751) (SEQ ID NO: 10), C-reactive protein (UniProt Accession No. P02741) (SEQ ID NO: 28), Coagulation factor X (UniProt Accession No. P00742) (SEQ ID NO: 7), Prothrombin (UniProt Accession No. P00734) (SEQ ID NO: 4), Hemoglobin subunit alpha (UniProt Accession No. P69905) (SEQ ID NO: 70), Antithrombin-III (UniProt Accession No. P01008) (SEQ ID NO: 11), Serotransferrin (UniProt Accession No. P02787) (SEQ ID NO: 38), or combinations thereof. In some embodiments, wherein the disease is liver disease and the proteins are any one or more of Alpha-1B-glycoprotein (UniProt Accession No. P04217) (SEQ ID NO: 44), Alpha-2-macroglobulin (UniProt Accession No. P01023) (SEQ ID NO: 15), Afamin (UniProt Accession No. P43652) (SEQ ID NO: 68), Angiotensinogen (UniProt Accession No. P01019) (SEQ ID NO: 14), Alpha-2-HS-glycoprotein (UniProt Accession No. P02765) (SEQ ID NO: 35), Serum albumin (UniProt Accession No. P02768) (SEQ ID NO: 36), Protein AMBP (UniProt Accession No. P02760) (SEQ ID NO: 33), Apolipoprotein A-I (UniProt Accession No. P02647) (SEQ ID NO: 21), Apolipoprotein A-II (UniProt Accession No. P02652) (SEQ ID NO: 23), Apolipoprotein B-100 (UniProt Accession No. P04114) (SEQ ID NO: 43), Apolipoprotein C-I (UniProt Accession No. P02654) (SEQ ID NO: 24), Apolipoprotein E (UniProt Accession No. P02649) (SEQ ID NO: 22), Apolipoprotein L1 (UniProt Accession No. 014791) (SEQ ID NO: 1), Complement C1q subcomponent subunit C (UniProt Accession No. P02747) (SEQ ID NO: 30), Complement C1r subcomponent (UniProt Accession No. P00736) (SEQ ID NO: 5), Complement C1s subcomponent (UniProt Accession No. P09871) (SEQ ID NO: 58), Complement C3 (UniProt Accession No. P01024) (SEQ ID NO: 16), Complement C4-A (UniProt Accession No. P0C0L4) (SEQ ID NO: 59), Complement C4-B (UniProt Accession No. P0C0L5) (SEQ ID NO: 60), C4b-binding protein alpha chain (UniProt Accession No. P04003) (SEQ ID NO: 41), Complement C5 (UniProt Accession No. P01031) (SEQ ID NO: 17), Complement component C8 alpha chain (UniProt Accession No. P07357) (SEQ ID NO: 53), Complement component C9 (UniProt Accession No. P02748) (SEQ ID NO: 31), Complement factor B (UniProt Accession No. P00751) (SEQ ID NO: 10), Complement factor H (UniProt Accession No. P08603) (SEQ ID NO: 56), Clusterin (UniProt Accession No. P10909) (SEQ ID NO: 61), Ceruloplasmin (UniProt Accession No. P00450) (SEQ ID NO: 2), C-reactive protein (UniProt Accession No. P02741) (SEQ ID NO: 28), Coagulation factor X (UniProt Accession No. P00742) (SEQ ID NO: 7), Coagulation factor XII (UniProt Accession No. P00748) (SEQ ID NO: 9), Prothrombin (UniProt Accession No. P00734) (SEQ ID NO: 4), Fibrinogen (UniProt Accession No. P02671) (SEQ ID NO: 27), Vitamin D-binding protein (UniProt Accession No. P02774) (SEQ ID NO: 37), Gelsolin (UniProt Accession No. P06396) (SEQ ID NO: 51), Hemoglobin subunit alpha (UniProt Accession No. P69905) (SEQ ID NO: 70), Haptoglobin (UniProt Accession No. P0073 8) (SEQ ID NO: 6), Hemopexin (UniProt Accession No. P02790) (SEQ ID NO: 39), Integrin alpha-Iib (UniProt Accession No. P08514) (SEQ ID NO: 54), Inter-alpha-trypsin inhibitor heavy chain H1 (UniProt Accession No. P19827) (SEQ ID NO: 63), Inter-alpha-trypsin inhibitor heavy chain H2 (UniProt Accession No. P19823) (SEQ ID NO: 62), Inter-alpha-trypsin inhibitor heavy chain H4 (UniProt Accession No. Q14624) (SEQ ID NO: 71), Plasma kallikrein (UniProt Accession No. P03952) (SEQ ID NO: 40), Apolipoprotein(a) (UniProt Accession No. P08519) (SEQ ID NO: 55), Leucine-rich alpha-2-glycoprotein (UniProt Accession No. P02750) (SEQ ID NO: 32), Lumican (UniProt Accession No. P51884) (SEQ ID NO: 69), Alpha-1-acid glycoprotein 1 (UniProt Accession No. P02763) (SEQ ID NO: 34), Plasminogen (UniProt Accession No. P00747) (SEQ ID NO: 8), Serum paraoxonase/arylesterase 1 (UniProt Accession No. P27169) (SEQ ID NO: 65), Serum paraoxonase/lactonase 3 (UniProt Accession No. Q15166) (SEQ ID NO: 72), Peroxiredoxin-2 (UniProt Accession No. P32119) (SEQ ID NO: 66), Serum amyloid A-4 protein (UniProt Accession No. P35542) (SEQ ID NO: 67), Alpha-1-antitrypsin (UniProt Accession No. P01009) (SEQ ID NO: 12), Alpha-1-antichymotrypsin (UniProt Accession No. P01011) (SEQ ID NO: 13), Antithrombin-III (UniProt Accession No. P01008) (SEQ ID NO: 11), Heparin cofactor 2 (UniProt Accession No. P05546) (SEQ ID NO: 50), Plasma protease C1 inhibitor (UniProt Accession No. P05155) (SEQ ID NO: 48), Serotransferrin (UniProt Accession No. P02787) (SEQ ID NO: 38), Vitronectin (UniProt Accession No. P04004) (SEQ ID NO: 42), von Willebrand factor (UniProt Accession No. P04275) (SEQ ID NO: 45), or combinations thereof. In some embodiments, the disease is vascular disease and the proteins are any one or more of Angiotensinogen (UniProt Accession No. P01019) (SEQ ID NO: 14), Alpha-2-HS-glycoprotein (UniProt Accession No. P02765) (SEQ ID NO: 35), Apolipoprotein A-I UniProt Accession No. P02647) (SEQ ID NO: 21), Apolipoprotein A-II (UniProt Accession No.) (SEQ ID NO: 23), Apolipoprotein A-IV (UniProt Accession No. P06727) (SEQ ID NO: 52), Apolipoprotein B-100 (UniProt Accession No. P04114) (SEQ ID NO: 43), Apolipoprotein C-I (UniProt Accession No. P02654) (SEQ ID NO: 24), Apolipoprotein C-11 (UniProt Accession No. P02655) (SEQ ID NO: 25), Apolipoprotein (UniProt Accession No. P02656) (SEQ ID NO: 26), Apolipoprotein E (UniProt Accession No. P02649) (SEQ ID NO: 22), Complement C5 (UniProt Accession No. P01031) (SEQ ID NO: 17), Clusterin (UniProt Accession No. P10909) (SEQ ID NO: 61), C-reactive protein (UniProt Accession No. P02741) (SEQ ID NO: 28), Coagulation factor X (UniProt Accession No. P00742) (SEQ ID NO: 7), Prothrombin (UniProt Accession No. P00734) (SEQ ID NO: 4), Hemoglobin subunit alpha (UniProt Accession No. P69905) (SEQ ID NO: 70), Haptoglobin (UniProt Accession No. P00738) (SEQ ID NO: 6), Integrin alpha-Iib (UniProt Accession No. P08514) (SEQ ID NO: 54), Apolipoprotein(a) (UniProt Accession No. P08519) (SEQ ID NO: 55), Plasminogen (UniProt Accession No. P00747) (SEQ ID NO: 8), Serum paraoxonase/arylesterase 1 (UniProt Accession No. P27169) (SEQ ID NO: 65), Serum paraoxonase/lactonase 3 (UniProt Accession No. Q15166) (SEQ ID NO: 72), Peroxiredoxin-2 (UniProt Accession No. P32119) (SEQ ID NO: 66), Antithrombin-III (UniProt Accession No. P01008) (SEQ ID NO: 11), Heparin cofactor 2 (UniProt Accession No. P05546) (SEQ ID NO: 50), von Willebrand factor (UniProt Accession No. P04275) (SEQ ID NO: 45), or combinations thereof. In some embodiments, the disease is lung damage and the proteins are any one or more of Alpha-2-HS-glycoprotein (UniProt Accession No. P02765) (SEQ ID NO: 35), Serum albumin (UniProt Accession No. P02768) (SEQ ID NO: 36), Protein AMBP (UniProt Accession No. P02760) (SEQ ID NO: 33), Zinc-alpha-2-glycoprotein (UniProt Accession No. P25311) (SEQ ID NO: 64), Complement C3 (UniProt Accession No. P01024) (SEQ ID NO: 16), Complement C5 (UniProt Accession No. P01031) (SEQ ID NO: 17), Complement factor B (UniProt Accession No. P00751) (SEQ ID NO: 10), Clusterin (UniProt Accession No. P10909) (SEQ ID NO: 61), Vitamin D-binding protein (UniProt Accession No. P02774) (SEQ ID NO: 37), Hemoglobin subunit alpha (UniProt Accession No. P69905) (SEQ ID NO: 70), Plasma protease C1 inhibitor (UniProt Accession No. P05155) (SEQ ID NO; 48), Serotransferrin (UniProt Accession No. P02787) (SEQ ID NO: 38), von Willebrand factor (UniProt Accession No. P04275) (SEQ ID NO: 45), or combinations thereof. In some embodiments, the disease is lung damage and the proteins are any one or more of Alpha-2-HS-glycoprotein (UniProt Accession No. P02765) (SEQ ID NO: 35), Serum albumin (UniProt Accession No. P02768) (SEQ ID NO: 36), Protein AMBP (UniProt Accession No. P02760) (SEQ ID NO: 33), Zinc-alpha-2-glycoprotein (UniProt Accession No. P25311) (SEQ ID NO: 64), Complement C3 (UniProt Accession No. P01024) (SEQ ID NO: 16), Complement C5 (UniProt Accession No. P01031) (SEQ ID NO: 17), Complement factor B (UniProt Accession No. P00751) (SEQ ID NO: 10), Clusterin (UniProt Accession No. P10909) (SEQ ID NO: 61), C-reactive protein (UniProt Accession No. P02741) (SEQ ID NO: 28), Coagulation factor XII (UniProt Accession No. P00748 (SEQ ID NO: 9) Vitamin D-binding protein (UniProt Accession No. P02774) (SEQ ID NO: 37), Hemoglobin subunit alpha (UniProt Accession No. P69905) (SEQ ID NO: 70), Plasma protease C1 inhibitor (UniProt Accession No. P05155) (SEQ ID NO; 48), Serotransferrin (UniProt Accession No. P02787) (SEQ ID NO: 38), von Willebrand factor (UniProt Accession No. P04275) (SEQ ID NO: 45), or combinations thereof. In some embodiments, the method further comprises comparing the biomarker signature from the subject to a biomarker signature from a reference sample. In some embodiments, the method further comprises making an assessment of the subject based on the comparison, wherein the assessment is a diagnosis of the disease in the subject. In some embodiments, the method further comprises treating the subject based on the diagnosis. In some embodiments, the reference sample is obtained from a control subject, wherein the control subject does not have a disease. In some embodiments, the reference sample is obtained from the subject before the subject is treated for the disease. In some embodiments, wherein the reference sample is from a subject that has been successfully treated for the disease. In some embodiments, the reference sample is from a subject that has the disease.

[0017] In various embodiments, the present invention provides a method for assessing and/or determining the state of health of a subject, the method comprising: obtaining a sample from a subject, contacting the sample with one or more proteases so as to obtain a digested sample, wherein the digested sample comprises one or more peptides; analyzing the digested sample by mass spectrometry so as to obtain mass spectrometry data; correlating the mass spectrometry data to the one or more peptides; and correlating the one or more peptides to one or more proteins, wherein the one or more proteins are listed in Table 15; and; comparing the presence or level of the one or more proteins in the sample from the subject to the presence or level of the one or more proteins in a reference sample so as to assess and/or determine the state of health of the subject. In some embodiments, the presence of one or more proteins in the sample from the subject relative to the reference sample is indicative of a poor state of health. In some embodiments, an increase in the level of one or more proteins in the sample from the subject relative to the reference sample is indicative of a poor state of health. In some embodiments, a decrease in the level of one or more proteins in the sample from the subject relative to the reference sample is indicative of a poor state of health. In some embodiments, a change in the level of one or more proteins in the sample from the subject relative to the reference sample is indicative of a poor state of health. In some embodiments, the absence of one or more proteins in the sample for the subject relative to the reference sample is indicative of wellness. In some embodiments, the mass spectrometry is selected reaction monitoring (SRM) mass spectrometry or multiple reaction monitoring (MRM) mass spectrometry. In some embodiments, the one or more peptides are correlated to the one or more proteins according to Table 5. In some embodiments, the mass spectrometry data comprises one or more Q1/Q3 mass value pairs, wherein the Q1/Q3 mass value pairs are correlated to the one or more peptides, and the one or more peptides are correlated to the one or more proteins according to Table 5. In some embodiments, the one or more peptides are correlated to the one or more proteins according to Table 7. In some embodiments, the mass spectrometry data comprises one or more precursor ions and one or more product ions, wherein the precursor ions and the product ions are correlated to the one or more peptides, and the one or more peptides are correlated to the one or more proteins according to Table 7. In some embodiments, the one or more peptides are correlated to the one or more proteins according to Table 8. In some embodiments, the mass spectrometry data comprises one or more precursor ions and one or more product ions, wherein the precursor ions and the product ions are correlated to the one or more peptides, and the one or more peptides are correlated to the one or more proteins according to Table 8. In some embodiments, the mass spectrometry is parallel reaction monitoring (PRM) mass spectrometry. In some embodiments, the one or more peptides are correlated to the one or more proteins according to Table 9. In some embodiments, the mass spectrometry data comprises one or more precursor ions and one or more product ions, wherein the precursor ions and the product ions are correlated to the one or more peptides, and the one or more peptides are correlated to the one or more proteins according to Table 9. In some embodiments, the one or more peptides are correlated to the one or more proteins according to Table 10. In some embodiments, the mass spectrometry data comprises one or more precursor ions and one or more product ions, wherein the precursor ions and the product ions are correlated to the one or more peptides, and the one or more peptides are correlated to the one or more proteins according to Table 10. In some embodiments, the mass spectrometry is data dependent acquisition (DDA) mass spectrometry. In some embodiments, the one or more peptides are correlated to the one or more proteins according to Table 11. In some embodiments, the mass spectrometry data comprises one or more precursor ions, wherein the precursor ions are correlated to the one or more peptides, and the one or more peptides are correlated to the one or more proteins according to Table 11. In some embodiments, the one or more peptides are correlated to the one or more proteins according to Table 12. In some embodiments, the mass spectrometry data comprises one or more precursor ions and one or more product ions, wherein the precursor ions and the product ions are correlated to the one or more peptides, and the one or more peptides are correlated to the one or more proteins according to Table 12. In some embodiments, the mass spectrometry is data independent acquisition (DIA) mass spectrometry. In some embodiments, the one or more peptides are correlated to the one or more proteins according to Table 13. In some embodiments, the mass spectrometry data comprises one or more precursor ions and one or more product ions, wherein the precursor ions and the product ions are correlated to the one or more peptides, and the one or more peptides are correlated to the one or more proteins according to Table 13. In some embodiments, the one or more peptides are correlated to the one or more proteins according to Table 14. In some embodiments, the mass spectrometry data comprises one or more precursor ions and one or more product ions, wherein the precursor ions and the product ions are correlated to the one or more peptides, and the one or more peptides are correlated to the one or more proteins according to Table 14. In various embodiments the present invention provides a method for diagnosing a disease in a subject, comprising: obtaining a sample from the subject; contacting the sample with one or more proteases so as to obtain a digested sample, wherein the digested sample comprises one or more peptides; analyzing the digested sample by mass spectrometry so as to obtain mass spectrometry data; correlating the mass spectrometry data to the one or more peptides; correlating the one or more peptides to one or more proteins so as to obtain the protein biomarker signature for the subject, wherein the one or more proteins are listed in Table 15: and comparing the protein biomarker signature from the subject to one or more reference protein biomarker signatures, wherein a change in the protein biomarker signature from the subject relative to one or more reference biomarker signatures is indicative of the disease in the subject In some embodiments, the method further comprises treating the subject and/or selecting a treatment for and/or providing a treatment to the subject based on the diagnosis. In various embodiments the present invention provides method for assessing the efficacy of the treatment, comprising: comparing the protein biomarker signature from the subject to one or more reference protein biomarker signatures, wherein a change in the protein biomarker signature from the subject relative to one or more reference biomarker signatures is indicative of the efficacy of the treatment. In some embodiments, the reference sample is obtained from a control subject, wherein the control subject does not have the disease In some embodiments, the reference sample is obtained from the subject before the subject is treated for the disease. In some embodiments, the reference sample is from a subject that has been successfully treated for the disease. In some embodiments, the disease is cardiovascular disease In some embodiments, the cardiovascular disease is selected from congestive heart failure, arrhythmia, pericarditis, acute myocardial infarction, infarcted myocardium, coronary artery disease, coronary heart disease, ischemic heart disease, cardiomyopathy, stroke, hypertensive heart disease, heart failure, pulmonary heart disease, ischemic syndrome, coronary microvascular disease, cardiac dysrhythmias, rheumatic heart disease, aortic aneurysms, cardiomyopathy, atrial fibrillation, congenital heart disease, endocarditis, inflammatory heart disease, inflammatory cardiomegaly, myocarditis, valvular heart disease, cerebrovascular disease, peripheral artery disease or any combination thereof. In some embodiments, the method further comprises determining that the subject does not have the disease; and selecting and/or providing a preventative treatment for the subject. In some embodiments, the method further comprises determining that the subject has the disease; and treating the subject and/or selecting a treatment for and/or providing a treatment for the subject. In various embodiments the present invention provides a method for assessing and/or determining the risk of developing a disease in a subject; comprising: obtaining a sample from the subject; treating the sample with one or more proteases so as to obtain a digested sample, wherein the digested sample comprises one or more peptides; analyzing the digested sample by mass spectrometry so as to obtain mass spectrometry data; correlating the mass spectrometry data to the one or more peptides; correlating the one or more peptides to one or more proteins so as to obtain a protein biomarker signature for the subject, wherein the one or more proteins are listed in Table 15; and comparing the protein biomarker signature from the subject to one or more reference protein biomarker signatures, wherein a change in the protein biomarker signature from the subject relative to the reference protein biomarker signatures is indicative of an increased risk of the subject developing the disease. In some embodiments, the reference protein biomarker signature is obtained from a control subject, wherein the control subject does not have the disease. In some embodiments, the reference protein biomarker signature is obtained from the subject before the subject is treated for the disease. In some embodiments, the reference protein biomarker signature is from a subject that has been successfully treated for the disease. In some embodiments, the disease is cardiovascular disease. In some embodiments, the cardiovascular disease is selected from congestive heart failure, arrhythmia, pericarditis, acute myocardial infarction, infarcted myocardium, coronary artery disease, coronary heart disease, ischemic heart disease, cardiomyopathy, stroke, hypertensive heart disease, heart failure, pulmonary heart disease, ischemic syndrome, coronary microvascular disease, cardiac dysrhythmias, rheumatic heart disease, aortic aneurysms, cardiomyopathy, atrial fibrillation, congenital heart disease, endocarditis, inflammatory heart disease, inflammatory cardiomegaly, myocarditis, valvular heart disease, cerebrovascular disease, peripheral artery disease or any combination thereof.

### BRIEF DESCRIPTION OF THE DRAWINGS

[0018] Exemplary embodiments are illustrated in referenced figures. It is intended that the embodiments and figures disclosed herein are to be considered illustrative rather than restrictive.

[0019] FIG. 1A-FIG. 1B depicts in accordance with various embodiments of the invention, automated proteomics sample preparation schema. FIG. 1A workflow and layout of the automated laboratory workstation. FIG. 1B outline of the automated digestion protocol. Detailed conditions are described in the online supplemental method provided in the examples section herein.

[0020] FIG. 2A-FIG. 2B depicts in accordance with various embodiments of the invention, reproducibility of the automated proteomics sample preparation workflow with expanded SRM analysis. Six plasma aliquots were processed on three separate days and analyzed with the IQ SRM-panel (a single scheduled 50 minutes LC MS/MS method targeting 72 proteins). FIG. 2A results stratified by average signal intensity from the three independent digests. FIG. 2B mean intensities (right panel) and mean CV % (left panel) of the three independent digests.

[0021] FIG. 3A-FIG. 3B depicts in accordance with various embodiments of the invention, trypsin digestion optimization. Reaction conditions were varied to optimize the digestion time FIG. 3A and trypsin:protein ratio FIG. 3B. FIG. 3A discloses SEQ ID NOS 251, 246, 245, 250, 248, 247, and 249, respectively, in order of appearance. FIG. 3B discloses SEQ ID NOS 79, 252, 138, 143, 81, 80, and 253, respectively, in order of appearance.

[0022] FIG. 4 depicts in accordance with various embodiments of the invention, inter-lab reproducibility. The final automated proteomics sample preparation method was implemented at Site 1 and at Site 2 sites. 24 or 48 plasma digests were analyzed on successive days at both labs. 93 peptides representing 44 proteins were monitored at both sites.

[0023] FIG. 5A-FIG. 5C depicts in accordance with various embodiments of the invention, FIG. 5A sample preparation reproducibility. β-gal was quantified by LC-SRM-MS in 16 samples prepared for SWATH-MS. FIG. 5B total proteins observed. FIG. 5C correlation of peptide and protein intensities in the SWATH-MS data (representative examples). FIG. 5A discloses SEQ ID NOS 254-259, respectively, in order of appearance.

[0024] FIG. 6A-FIG. 6C depicts in accordance with various embodiments of the invention, FIG. 6A represents a network map of the different function and/or disease hubs associated with the 72 plex. The brown circles in the edges represent the key hubs. The blue proteins in the edges represent proteins unique to a function and/or disease hub and the orange proteins in the center represent proteins shared across multiple functions and/or disease hubs. FIG. 6B is a table of the different key functions and/or disease hubs, their associated p-value, the molecule name and number of molecules in each hub associated with the 72 plex. FIG. 6C is a heatmap of the different proteins in the 72 plex and the degree of their overlap across the different function and/or disease hubs. For example, the proteins at the top C5, AGT, C3 in orange are shared across several functions/disease hubs and hence represent key regulators. The proteins at the bottom SERPIND1, SHBG, VTN in blue are unique to certain function/disease hub.

[0025] FIG. 7A-FIG. 7B depicts in accordance with various embodiments of the invention, automated proteomic sample preparation schema. FIG. 7A workflow and layout of the automated laboratory workstation. FIG. 7B outline of the automated digestion protocol. See examples section herein for details.

[0026] FIG. 8A-FIG. 8B depicts in accordance with various embodiments of the invention, reproducibility of the automated proteomic sample preparation workflow with a highly multiplexed SRM analysis. Six plasma aliquots were processed three times on separate days. The resulting peptides were analyzed by LC MS/MS with a 30 min LC gradient and a scheduled SRM method targeting 72 proteins. FIG. 8A average intensities (left panel) and interday % CVs (right panel) of the three independent digests. FIG. 8B results stratified by average signal intensity.

[0027] FIG. 9A-FIG. 9B depicts in accordance with various embodiments of the invention, trypsin digestion time course. Pooled human plasma was digested with trypsin for various times and then analyzed with the highly multiplexed SRM assay. Recoveries for each peptide were normalized to the 2 hour time point. FIG. 9A results for 162 peptides from 70 proteins are plotted individually (left panel) and collectively (right panel). FIG. 9B peak intensity variations over time for peptides from albumin, α-1-antitrypsin, and α-1-antichymotrypsin. FIG. 9B discloses SEQ ID NOS 166, 162, 160, 77, 76, 164, 165, 79, 110, 108, 109, 111, 112, 116, 114, 113, and 111 respectively, in order of appearance.

[0028] FIG. 10A-FIG. 10B depicts in accordance with various embodiments of the invention, interlab reproducibility. The final automated processing method was Site 1 (n=24) and at Site 2 (n=48). SRM assay results are presented for 360 transitions from 93 peptides representing 44 proteins that were measured at both sites. FIG. 10A percent CVs for individual peptides. FIG. 10B results stratified by % CV ranges.

[0029] FIG. 11A-FIG. 11B depicts in accordance with various embodiments of the invention, trypsin digestion optimization. Reaction conditions were varied to optimize FIG. 11A the typsin:protein ratio and FIG. 11B the digestion time. The results were analyzed with an SRM assay targeting endogenous proteins plus spiked β-gal. FIG. 11A discloses SEQ ID NOS 79, 128, 143, 81 and 253 respectively, in order of appearance. FIG. 11B discloses SEQ ID NOS 79, 78, 82, 81, and 73 respectively, in order of appearance.

[0030] FIG. 12A-FIG. 12D depicts in accordance with various embodiments of the invention, reproducibility assessed by the digestion of plasma samples from 48 individuals. β-gal was spiked into each sample before processing as a quality control indicator to report technical variation. The digests were analyzed with the highly multiplexed SRM assay. Signal intensity spread of peptides from β-gal (FIG. 12A) and selected endogenous proteins (FIG. 12B). % CVS (FIG. 12C). Average intensities (FIG. 12D). FIG. 12A discloses SEQ ID NOS 254, 255, 256, 258, and 75 respectively, in order of appearance. FIG. 12B discloses SEQ ID NOS 246, 1917, 1918, 247, 248, and 1919 respectively, in order of appearance. FIG. 12C discloses SEQ ID NOS 254, 255, 256, 258, 75, 246, 1917, 1918, 247, 248, and 1919 respectively, in order of appearance. FIG. 12D discloses SEQ ID NOS 254, 255, 258, 75, 246, 1917, 1918, 247, 248 and 1919 respectively, in order of appearance.

[0031] FIG. 13 depicts in accordance with various embodiments of the invention, quantifier transition validation. Transition ratios were determined to compare the measured amounts of qualifier and quantifier transitions for six exemplary peptides in 48 plasma samples. FIG. 13 discloses SEQ ID NOS 81, 80, 1920, 79, 82, and 125 respectively, in order of appearance.

[0032] FIG. 14A-FIG. 14B depicts in accordance with various embodiments of the invention, FIG. 14A is a Targeted Peptide Selection process to build the 72 plex assay starting with all 2529 Expected Peptides between 6-30 amino acids in length with no missed cleavages. We filtered the list to only keep 2274 peptides that match to a single protein or single gene family (considered to be proteotypic in order to perform unambiguous mapping of the measured protein analyte in the 72 plex). The resulting peptides were further filtered to only keep 1797 peptides that do not contain Methionine residue in the peptide sequence to avoid uncontrolled modification bias that often affects methionine. Of the total 1797 expected peptides, we have MS evidence for 1103 Peptides that have been observed using 1 or more MS methods (including 6500 MRM-MS, QE PRM-MS, 6600 DIA-MS, Lumos DDA-MS). FIG. 14B represents a Venn diagram of the 1103 observed peptides to depict the shared and unique peptides to each of the 4 MS methods used above.

[0033] FIG. 15 depicts in accordance with various embodiments of the invention, representative Extracted Ion Chromatogram (XIC) obtained by PRM analysis of peptide ELLESYIDGR (SEQ ID NO: 92) correlated to a protein Prothrombin (UniProt Accession No. P00734) (SEQ ID NO: 4). An overlay of the endogenous peptide XIC (red trace) and reference peptide XIC (blue trace) recorded during chromatographic elution profile (left panel). XICs are extracted from the main fragment ions of the endogenous peptide (center panel) and reference peptide (right panel). Stable isotope labelled peptide (heavy) is used to confirm the identity of the native peptide.

[0034] FIG. 16 depicts in accordance with various embodiments of the invention, representative Extracted Ion Chromatogram (XIC) obtained by PRM analysis of peptide YTTEIIK (SEQ ID NO: 95) correlated to a protein Complement C1r subcomponent (UniProt Accession No. P00736) (SEQ ID NO: 50). An overlay of the endogenous peptide XIC (red trace) and reference peptide XIC (blue trace) recorded during chromatographic elution profile (left panel). XICs are extracted from the main fragment ions of the endogenous peptide (center panel) and reference peptide (right panel). Stable isotope labelled peptide (heavy) is used to confirm the identity of the native peptide.

[0035] FIG. 17 depicts in accordance with various embodiments of the invention, representative Extracted Ion Chromatogram (XIC) obtained by PRM analysis of peptide EFGNTLEDK (SEQ ID NO: 145) correlated to a protein Apolipoprotein C-I (UniProt Accession No. P02654) (SEQ ID NO: 24). An overlay of the endogenous peptide XIC (red trace) and reference peptide XIC (blue trace) recorded during chromatographic elution profile (left panel). XICs are extracted from the main fragment ions of the endogenous peptide (center panel) and reference peptide (right panel). Stable isotope labelled peptide (heavy) is used to confirm the identity of the native peptide.

[0036] FIG. 18 depicts in accordance with various embodiments of the invention, representative Extracted Ion Chromatogram (XIC) obtained by PRM analysis of peptide IYLQPGR (SEQ ID NO: 224) correlated to a protein Inter-alpha-trypsin inhibitor heavy chain H2 (UniProt Accession No. P19823) (SEQ ID NO: 62). An overlay of the endogenous peptide XIC (red trace) and reference peptide XIC (blue trace) recorded during chromatographic elution profile (left panel). XICs are extracted from the main fragment ions of the endogenous peptide (center panel) and reference peptide (right panel). Stable isotope labelled peptide (heavy) is used to confirm the identity of the native peptide.

[0037] FIG. 19 depicts in accordance with various embodiments of the invention, representative Extracted Ion Chromatogram (XIC) obtained by PRM analysis of peptide SPDVINGSPISQK (SEQ ID NO: 209) correlated to a protein Complement factor H (UniProt Accession No. P08603) (SEQ ID NO: 56). An overlay of the endogenous peptide XIC (red trace) and reference peptide XIC (blue trace) recorded during chromatographic elution profile (left panel). XICs are extracted from the main fragment ions of the endogenous peptide (center panel) and reference peptide (right panel). Stable isotope labelled peptide (heavy) is used to confirm the identity of the native peptide.

[0038] FIG. 20 depicts in accordance with various embodiments of the invention, representative Extracted Ion Chromatogram (XIC) obtained by PRM analysis of peptide QFPILLDFK (SEQ ID NO: 193) correlated to a protein Heparin cofactor 2 (UniProt Accession No. P05546) (SEQ ID NO: 50). An overlay of the endogenous peptide XIC (red trace) and reference peptide XIC (blue trace) recorded during chromatographic elution profile (left panel). XICs are extracted from the main fragment ions of the endogenous peptide (center panel) and reference peptide (right panel). Stable isotope labelled peptide (heavy) is used to confirm the identity of the native peptide.

[0039] FIG. 21 depicts in accordance with various embodiments of the invention, representative Extracted Ion Chromatogram (XIC) obtained by PRM analysis of peptide FTPTETNK (SEQ ID NO: 344) correlated to a protein Complement component C9 (UniProt Accession No. P02748) (SEQ ID NO: 31). An overlay of XICs of the endogenous precursor ion and the main fragment ions recorded during chromatographic elution profile (left panel). A magnified view of the fragment ions XICs overlay form the left panel (right panel).

[0040] FIG. 22 depicts in accordance with various embodiments of the invention, representative Extracted Ion Chromatogram (XIC) obtained by PRM analysis of peptide TAAQNLYEK (SEQ ID NO: 146) correlated to a protein Apolipoprotein (UniProt Accession No. P02655) (SEQ ID NO: 25). An overlay of XICs of the endogenous precursor ion and the main fragment ions recorded during chromatographic elution profile (left panel). A magnified view of the fragment ions XICs overlay form the left panel (right panel).

[0041] FIG. 23 depicts in accordance with various embodiments of the invention, representative Extracted Ion Chromatogram (XIC) obtained by PRM analysis of peptide QQTEWQSGQR (SEQ ID NO: 492) correlated to a protein Apolipoprotein E (UniProt Accession No. P02649) (SEQ ID NO: 22). An overlay of XICs of the endogenous precursor ion and the main fragment ions recorded during chromatographic elution profile (left panel). A magnified view of the fragment ions XICs overlay form the left panel (right panel).

[0042] FIG. 24 depicts in accordance with various embodiments of the invention, representative Extracted Ion Chromatogram (XIC) obtained by PRM analysis of peptide NDLISATK (SEQ ID NO: 293) correlated to a protein Inter-alpha-trypsin inhibitor heavy chain H2 (UniProt Accession No. P19823) (SEQ ID NO: 62). An overlay of XICs of the endogenous precursor ion and the main fragment ions recorded during chromatographic elution profile (left panel). A magnified view of the fragment ions XICs overlay form the left panel (right panel).

[0043] FIG. 25 depicts in accordance with various embodiments of the invention, representative Extracted Ion Chromatogram (XIC) obtained by PRM analysis of peptide NVHSGSTFFK (SEQ ID NO: 1504) correlated to a protein Inter-alpha-trypsin inhibitor heavy chain H4 (UniProt Accession No. Q14624) (SEQ ID NO: 71). An overlay of XICs of the endogenous precursor ion and the main fragment ions recorded during chromatographic elution profile (left panel). A magnified view of the fragment ions XICs overlay form the left panel (right panel).

[0044] FIG. 26 depicts in accordance with various embodiments of the invention, representative Extracted Ion Chromatogram (XIC) obtained by PRM analysis of peptide NNQIDHIDEK (SEQ ID NO: 1526) correlated to a protein Lumican (UniProt Accession No. P51884) (SEQ ID NO: 69). An overlay of XICs of the endogenous precursor ion and the main fragment ions recorded during chromatographic elution profile (left panel). A magnified view of the fragment ions XICs overlay form the left panel (right panel).

[0045] FIG. 27A-FIG. 27C depicts in accordance with various embodiments of the invention, FIG. 27A represents a network map of the different function and/or disease hubs associated with the 72 plex. The brown circles in the edges represent the key hubs. The blue proteins in the edges represent proteins unique to a function and/or disease hub and the orange proteins in the center represent proteins shared across multiple functions and/or disease hubs. FIG. 27B is a table of the different key functions and/or disease hubs, the protein identification numbers from UniProt database, the protein names and gene names associated with the 72 plex. FIG. 27C is a heatmap of the different proteins in the 72 plex and the degree of their overlap across the different function and/or disease hubs. For example, the proteins at the top C5, CRP, APOE, C3, AGT in orange are shared across several functions/disease/process and hence represent key regulators.

### DETAILED DESCRIPTION OF THE INVENTION

[0046] All references cited herein are incorporated by reference in their entirety as though fully set forth. Unless defined otherwise, technical and scientific terms used herein have the same meaning as commonly understood by one of ordinary skill in the art to which this invention belongs. Allen et al., Remington: The Science and Practice of Pharmacy 22^{nd} ed., Pharmaceutical Press (Sep. 15, 2012); Hornyak et al., Introduction to Nanoscience and Nanotechnology, CRC Press (2008); Singleton and Sainsbury, Dictionary of Microbiology and Molecular Biology 3^{rd} ed., revised ed., J. Wiley & Sons (New York, N.Y. 2006); Smith, March's Advanced Organic Chemistry Reactions, Mechanisms and Structure 7^{th} ed., J. Wiley & Sons (New York, N.Y. 2013); Singleton, Dictionary of DNA and Genome Technology 3^{rd} ed., Wiley-Blackwell (Nov. 28, 2012); and Green and Sambrook, Molecular Cloning: A Laboratory Manual 4th ed., Cold Spring Harbor Laboratory Press (Cold Spring Harbor, N.Y. 2012), provide one skilled in the art with a general guide to many of the terms used in the present application.

[0047] For references on mass spectrometry and proteomics, see e.g., Salvatore Sechi, Quantitative Proteomics by Mass Spectrometry (Methods in Molecular Biology) 2nd ed. 2016 Edition, Humana Press (New York, N.Y., 2009); Daniel Martins-de-Souza, Shotgun Proteomics: Methods and Protocols 2014 edition, Humana Press (New York, N.Y., 2014); Jörg Reinders and Albert Sickmann, Proteomics: Methods and Protocols (Methods in Molecular Biology) 2009 edition, Humana Press (New York, N.Y., 2009); and Jörg Reinders, Proteomics in Systems Biology: Methods and Protocols (Methods in Molecular Biology) 1^{st} ed. 2016 edition, Humana Press (New York, N.Y., 2009).

[0048] One skilled in the art will recognize many methods and materials similar or equivalent to those described herein, which could be used in the practice of the present invention. Other features and advantages of the invention will become apparent from the following detailed description, taken in conjunction with the accompanying drawings, which illustrate, by way of example, various features of embodiments of the invention. Indeed, the present invention is in no way limited to the methods and materials described. For convenience, certain terms employed herein, in the specification, examples and appended claims are collected here.

[0049] Unless stated otherwise, or implicit from context, the following terms and phrases include the meanings provided below. Unless explicitly stated otherwise, or apparent from context, the terms and phrases below do not exclude the meaning that the term or phrase has acquired in the art to which it pertains. Unless otherwise defined, all technical and scientific terms used herein have the same meaning as commonly understood by one of ordinary skill in the art to which this invention belongs. It should be understood that this invention is not limited to the particular methodology, protocols, and reagents, etc., described herein and as such can vary. The definitions and terminology used herein are provided to aid in describing particular embodiments, and are not intended to limit the claimed invention, because the scope of the invention is limited only by the claims.

[0050] As used herein the term “comprising” or “comprises” is used in reference to compositions, methods, and respective component(s) thereof, that are useful to an embodiment, yet open to the inclusion of unspecified elements, whether useful or not. It will be understood by those within the art that, in general, terms used herein are generally intended as “open” terms (e.g., the term “including” should be interpreted as “including but not limited to,” the term “having” should be interpreted as “having at least,” the term “includes” should be interpreted as “includes but is not limited to,” etc.). Although the open-ended term “comprising,” as a synonym of terms such as including, containing, or having, is used herein to describe and claim the invention, the present invention, or embodiments thereof, may alternatively be described using alternative terms such as “consisting of” or “consisting essentially of.”

[0051] Unless stated otherwise, the terms “a” and “an” and “the” and similar references used in the context of describing a particular embodiment of the application (especially in the context of claims) can be construed to cover both the singular and the plural. The recitation of ranges of values herein is merely intended to serve as a shorthand method of referring individually to each separate value falling within the range. Unless otherwise indicated herein, each individual value is incorporated into the specification as if it were individually recited herein. All methods described herein can be performed in any suitable order unless otherwise indicated herein or otherwise clearly contradicted by context. The use of any and all examples, or exemplary language (for example, “such as”) provided with respect to certain embodiments herein is intended merely to better illuminate the application and does not pose a limitation on the scope of the application otherwise claimed. The abbreviation, “e.g.” is derived from the Latin exempli gratia, and is used herein to indicate a non-limiting example. Thus, the abbreviation “e.g.” is synonymous with the term “for example.” No language in the specification should be construed as indicating any non-claimed element essential to the practice of the application.

[0052] “Optional” or “optionally” means that the subsequently described circumstance may or may not occur, so that the description includes instances where the circumstance occurs and instances where it does not.

[0053] The term “sample” or “biological sample” as used herein denotes a sample taken or isolated from a biological organism, e.g., a tumor sample from a subject. Exemplary biological samples include, but are not limited to, cheek swab; mucus; whole blood, blood, serum; plasma; urine; saliva; semen; lymph; fecal extract; sputum; other body fluid or biofluid; cell sample; tissue sample; tumor sample; and/or tumor biopsy etc. Exemplary biological samples include, but are not limited to, cheek swab; mucus; whole blood, blood, serum; plasma; blood products, urine; saliva; semen; lymph; fecal extract; sputum; other body fluid or biofluid; cell sample; tissue sample; tissue extract; tumor sample; and/or tumor biopsy etc. The term also includes a mixture of the above-mentioned samples. The term “sample” also includes untreated or pretreated (or pre-processed) biological samples. In some embodiments, a sample can comprise one or more cells from the subject. In some embodiments, a sample can be a tumor cell sample, e.g. the sample can comprise cancerous cells, cells from a tumor, and/or a tumor biopsy. In some embodiments, samples or biological samples comprise derivatives of blood products, including blood, plasma and/or serum. In some embodiments, the sample is a biological sample. In some embodiments, the sample is blood. In some embodiments, the sample is plasma. In some embodiments, the sample is serum. In some embodiments the sample is cerebrospinal fluid (CSF). In some embodiments the sample is a tissue extract. In some embodiments the sample is a biopsy sample. In some embodiments the sample is a biopsy specimen. In some embodiments the sample is urine. In some embodiments the sample is plasma, serum, cerebrospinal fluid (CSF), a tissue extract, urine, a biopsy specimen, or a biopsy sample. In some embodiments, the sample comprises one or more proteins and/or one or more peptides. In some embodiments, the sample comprises one or more peptides. In some embodiments, the sample comprises one or more proteins.

[0054] The terms “body fluid” or “bodily fluids” are liquids originating from inside the bodies of organisms. Bodily fluids include amniotic fluid, aqueous humour, vitreous humour, bile, blood (e.g., serum), breast milk, cerebrospinal fluid, cerumen (earwax), chyle, chyme, endolymph and perilymph, exudates, feces, female ejaculate, gastric acid, gastric juice, lymph, mucus (e.g., nasal drainage and phlegm), pericardial fluid, peritoneal fluid, pleural fluid, pus, rheum, saliva, sebum (skin oil), serous fluid, semen, smegma, sputum, synovial fluid, sweat, tears, urine, vaginal secretion, and vomit. Extracellular bodily fluids include intravascular fluid (blood plasma), interstitial fluids, lymphatic fluid and transcellular fluid. Immunoglobulin G (IgG), the most abundant antibody subclass, may be found in all body fluids. “Biological sample” also includes a mixture of the above-mentioned body fluids. “Biological samples” may be untreated or pretreated (or pre-processed) biological samples.

[0055] Sample collection procedures and devices known in the art are suitable for use with various embodiment of the present invention. Examples of sample collection procedures and devices include but are not limited to: phlebotomy tubes (e.g., a vacutainer blood/specimen collection device for collection and/or storage of the blood/specimen), dried blood spots, Microvette CB300 Capillary Collection Device (Sarstedt), HemaXis blood collection devices (microfluidic technology, Hemaxis), Volumetric Absorptive Microsampling (such as CE-IVD Mitra microsampling device for accurate dried blood sampling (Neoteryx), HemaSpot™-HF Blood Collection Device. Additional sample collection procedures and devices include but are not limited to: a tissue sample collection device; standard collection/storage device (e.g., a collection/storage device for collection and/or storage of a sample (e.g., blood, plasma, serum, urine, etc.); a dried blood spot sampling device. In some embodiments, the Volumetric Absorptive Microsampling (VAMS™) samples can be stored and mailed, and an assay can be performed remotely.

[0056] As used herein, a “subject” means a human or animal. Usually the animal is a vertebrate such as a primate, rodent, domestic animal or game animal. Primates include chimpanzees, cynomologous monkeys, spider monkeys, and macaques, e.g., Rhesus. Rodents include mice, rats, woodchucks, ferrets, rabbits and hamsters. Domestic and game animals include cows, horses, pigs, deer, bison, buffalo, feline species, e.g., domestic cat, and canine species, e.g., dog, fox, wolf. The terms, “patient”, “individual” and “subject” are used interchangeably herein. In an embodiment, the subject is mammal. The mammal can be a human, non-human primate, mouse, rat, dog, cat, horse, or cow, but are not limited to these examples. In addition, the methods described herein can be used to treat domesticated animals and/or pets. In various embodiments, the subject is human.

[0057] “Mammal” as used herein refers to any member of the class Mammalia, including, without limitation, humans and nonhuman primates such as chimpanzees and other apes and monkey species; farm animals such as cattle, sheep, pigs, goats and horses; domestic mammals such as dogs and cats; laboratory animals including rodents such as mice, rats and guinea pigs, and the like. The term does not denote a particular age or sex. Thus, adult and newborn subjects, as well as fetuses, whether male or female, are intended to be included within the scope of this term.

[0058] As used herein, the term “amino acid” refers to naturally occurring and synthetic amino acids, as well as amino acid analogs and amino acid mimetics that operate in a manner similar to the naturally occurring amino acids. Naturally occurring amino acids are those encoded by the genetic code, as well as those amino acids that are later modified, e.g., hydroxyproline, -carboxyglutamate, and O-phosphoserine. Amino acid analogs refers to compounds that have the same basic chemical structure as a naturally occurring amino acid, i.e., an carbon that is bound to a hydrogen, a carboxyl group, an amino group, and an R group, e.g., homoserine, norleucine, methionine sulfoxide, methionine methyl sulfonium. Such analogs have modified R groups (e.g., norleucine) or modified peptide backbones, but retain the same basic chemical structure as a naturally occurring amino acid. Amino acid mimetics refers to chemical compounds that have a structure that is different from the general chemical structure of an amino acid, but that operates in a manner similar to a naturally occurring amino acid. Amino acids may be referred to herein by either their commonly known three letter symbols or by the one-letter symbols recommended by the IUPAC-IUB Biochemical Nomenclature Commission. Nucleotides, likewise, may be referred to by their commonly accepted single-letter codes.

[0059] A protein refers to any of a class of nitrogenous organic compounds that comprise large molecules composed of one or more long chains of amino acids and are an essential part of all living organisms. A protein may contain various modifications to the amino acid structure such as disulfide bond formation, phosphorylations and glycosylations. A linear chain of amino acid residues may be called a “polypeptide.” A protein contains at least one polypeptide. Short polypeptides, e.g., containing less than 20-30 residues, are sometimes referred to as “peptides.”

[0060] In some embodiments, the term “peptide” as used herein refers to a polymer of amino acid residues typically ranging in length from 2 to about 30, or to about 40, or to about 50, or to about 60, or to about 70 residues. In certain embodiments the peptide ranges in length from about 2, 3, 4, 5, 7, 9, 10, or 11 residues to about 60, 50, 45, 40, 45, 30, 25, 20, or 15 residues. In certain embodiments the peptide ranges in length from about 8, 9, 10, 11, or 12 residues to about 15, 20 or 25 residues. In certain embodiments the amino acid residues comprising the peptide are “L-form” amino acid residues, however, it is recognized that in various embodiments, “D” amino acids can be incorporated into the peptide. Peptides also include amino acid polymers in which one or more amino acid residues are an artificial chemical analogue of a corresponding naturally occurring amino acid, as well as to naturally occurring amino acid polymers. In addition, the term applies to amino acids joined by a peptide linkage or by other, “modified linkages” (e.g., where the peptide bond is replaced by an a-ester, a f3-ester, a thioamide, phosphonamide, carbamate, hydroxylate, and the like (see, e.g., Spatola, (1983) Chem. Biochem. Amino Acids and Proteins 7: 267-357), where the amide is replaced with a saturated amine (see, e.g., Skiles et al., U.S. Pat. No. 4,496,542, which is incorporated herein by reference, and Kaltenbronn eta/., (1990) Pp. 969-970 in Proc. 11th American Peptide Symposium, ESCOM Science Publishers, The Netherlands, and the like)).

[0061] In some embodiments, the one or more proteins and/or one or more peptides in the sample are modified. In some embodiments, the one or more proteins and/or one or more peptides in the sample are chemically modified. In some embodiments, the modification is any one or more of phosphorylation, methylation, acetylation, o-GlycNacylation, s-nitrosylation, citrullination, sumoylation, ubiquitinylation, neddylation, methyglyoxylation, or a post-translational modification.

[0062] The term “threshold” as used herein refers to the magnitude or intensity that must be exceeded for a certain reaction, phenomenon, result, or condition to occur or be considered relevant. The relevance can depend on context, e.g., it may refer to a positive, reactive or statistically significant relevance.

[0063] The term “condition” (biological state or health state) is understood in the present invention as status of a subject that can be described by physical, mental or social criteria. It includes as well so-called “healthy” and “diseased” conditions, therefore it is not limited to the WHO definition of health as “a state of complete physical, mental, and social well-being and not merely the absence of disease or infirmity,” but includes disease and infirmity.

[0064] The term “disease” refers to an abnormal condition affecting the body of an organism. The term “disorder” refers to a functional abnormality or disturbance.

[0065] The term “state of health” includes at least one condition as defined herein. It may also include a plurality of different conditions. In some embodiments, the state of health is a healthy state. In some embodiments, the state of health is a diseased state. In some embodiments, the state of health is a poor state of health. In some embodiments, the state of health is a good state of health. In some embodiments, the state of health is a healthy state. In some embodiments, the state of health is an unhealthy state.

[0066] The term “poor state of health” means that the subject has one or more diseases or disorders or is at risk of having one or more diseases or disorders; has or is at risk of having one or more disorders associated with function or development; and/or has or is at risk of having one or more disorders of a function or development.

[0067] The term “good state of health” means that the subject does not have one or more diseases or disorders; does not have one or more disorders associated with function or development; or does not have one or more disorders of a function or development.

[0068] The term “healthy state” or “normal state” means that the state of a subject is not abnormal or does not comprise a disease or disorder.

[0069] A “healthy subject” or “normal subject” is a subject that does not have a disease or disorder.

[0070] The term “unhealthy state” or “abnormal state” means that the state of the subject is abnormal or does comprise a disease or disorder.

[0071] The term “unhealthy subject” or “abnormal subject” is a subject that does have a disease or disorder.

[0072] The term “wellness” means that the subject does not have one or more diseases or disorders; does not have one or more disorders associated with function or development; does not have one or more disorders of a function or development; or the subject is in a healthy state; or the subject is in a normal state; or the subject is in a state of being in good health.

[0073] Non-limiting examples of diseases include atherosclerosis, inflammatory response, cardiac disease, lung damage, renal failure, endothelial dysfunction, cardiovascular disease, neurological disease, organismal injury, organismal abnormalities, psychological disorders, developmental disorder, hereditary disorder, immunological disease, cell-to-cell signaling, cell-to-cell interaction, cardiac inflammation, connective tissue development and function, connective tissue disorders, skeletal disorders, muscular disorders.

[0074] Non-limiting examples of diseases include disorders associated with function or development such as lipid metabolism, redox signaling, immune response, hematological system development, hematological system function, reproductive system development, reproductive system function, and gene expression.

[0075] Other non-limiting examples of diseases include cancer, gastrointestinal disease, hepatic system disease, reproductive system disease, dermatological diseases, cell death, metabolic disease, neurological disease, immunological disease, hematological disease, psychological disorders, endocrine system disorders, connective tissue disorders, infectious diseases, hereditary disorder, respiratory disease, renal disease, urological disease, nutritional disease, and ophthalmic disease.

[0076] Other non-limiting examples of diseases include disorders associated with function or development such as cellular movement, cellular growth, cell proliferation, tissue morphology, organismal survival, molecular transport, immune cell trafficking, cell-to-cell signaling, cell-to-cell interaction, lipid metabolism, small molecule biochemistry, tissue development, protein synthesis, free radical scavenging, protein degradation, protein synthesis, hematological system development, hematological system function, tissue morphology, carbohydrate metabolism, cellular function and maintenance, cell signaling, vitamin metabolism, mineral metabolism, digestive system development, digestive system function, hepatic system development, hepatic system function, hair development, hair function, skin development, skin function, nervous system development, nervous system function, cellular compromise, nucleic acid metabolism, small molecule biochemistry, organ morphology, organismal development, renal system development, renal system function, urological system development, urological system function, humoral immune response, amino acid metabolism, energy production, post-translational modification.

[0077] Other non-limiting examples of diseases include Cardiovascular Disease, Hematological Disease, Hematological System Development and Function, Neurological Disease, Organismal Injury and Abnormalities, Psychological Disorders, Developmental Disorder, Hereditary Disorder, Immunological Disease, Organismal Injury and Abnormalities, Cell-To-Cell Signaling and Interaction, Reproductive System Development and Function, Gene Expression, Cardiac Inflammation, Cardiovascular Disease, Connective Tissue Development and Function, Connective Tissue Disorders, Organismal Injury and Abnormalities, Hereditary Disorder, Organismal Injury and Abnormalities, Skeletal and Muscular Disorders.

[0078] Other non-limiting examples of diseases include abdominal cancer, urogenital cancer, abdominal adenocarcinoma, liver lesion, tumorigenesis of genital organ, genital tumor, pelvic cancer, female genital tract cancer, tumorigenesis of reproductive tract, liver cancer, skin lesion, melanoma, skin tumor, malignant cutaneous melanoma cancer, cell death, breast or ovarian cancer, lymphohematopoietic cancer, amyloidosis, glucose metabolism disorder, Lymphoid Cancer and Tumors, hematologic cancer, Dementia, lymphoproliferative malignancy, lymphoid cancer, Alzheimer's disease, diabetes mellitus, inflammation of organ, inflammation of absolute anatomical region, Rheumatic Disease, leukemia, inflammation of body cavity, ovarian cancer, Viral Infection, myeloproliferative disorder, occlusion of artery, chronic inflammatory disorder, atherosclerosis, systemic autoimmune syndrome, acute leukemia, bone marrow cancer, inflammation of joint, neuromuscular disease, acute myeloid leukemia, Thrombosis, Infarction, Movement Disorders, hemostasis, acute coronary syndrome, rheumatoid arthritis, disorder of basal ganglia, autosomal, recessive disease, coronary disease, peripheral vascular disease, Huntington's Disease, abnormal morphology of abdomen, blood clot, immunodeficiency, myocardial infarction, cerebrovascular dysfunction, Bacterial Infections, endocytosis, advanced malignant tumor, damage of lung, hemorrhagic disease, coronary artery disease, Fibrosis, Hypertension, autosomal dominant disease, acute myocardial infarction, injury of lung, systemic inflammatory response syndrome and/or sepsis, infiltration by neutrophils, renal impairment, vascular lesion, anemia, progressive motor neuropathy, disorder of pregnancy, sepsis, atherosclerotic lesion, failure of kidney, chemotaxis of myeloid cells, chemotaxis of phagocytes, inflammation of liver, accumulation of lipid, inflammation of intestine, blood protein disorder, obesity, adenoma, psoriasis, necrosis of epithelial tissue, complement component deficiency, damage of genitourinary system, chronic kidney disease, accumulation of blood cells, insulin resistance, Nephritis, colitis, non-insulin-dependent diabetes mellitus, thrombus, hyperlipoproteinemia, hemolysis, acute lung injury, damage of kidney, dyslipidemia, stroke, lupus erythematosus, cytopenia, Edema, chronic fatigue syndrome, atherogenesis, ischemia of brain, chronic renal failure, thrombocytopenia, diabetic complication, Polycystic Kidney Disease, damage of liver, retinal degeneration, age-related, macular degeneration, dengue fever, formation of blood clot, severe sepsis, Hypercholesterolemia, cholangiocarcinoma, hyperlipidemia, inflammation of pancreas, stenosis, septic shock, cirrhosis of liver, damage of central nervous system, cell death of endothelial cells, Wound, injury of liver, glomerulonephritis, fibrin clot, dengue hemorrhagic fever, thromboembolism, ischemia of heart, thrombosis of vein, infarction of cerebrum, hemolytic anemia, prostatic intraepithelial neoplasia, damage of bone, end stage renal disease, Parasitic Infection, apoptosis of endothelial cells, abnormality of left ventricle, cardiac lesion, venous thromboembolism, fibrinolysis, systemic inflammatory response syndrome, familial amyloidosis, atherosclerosis of aorta, formation of thrombus, bleeding of gastrointestinal tract, Hypertriglyceridemia, hereditary bleeding disorder, autoimmune, glomerulonephritis, cerebral ischemia, infection by Herpesviridae, sexually transmitted disease, metabolic syndrome X, hereditary angioedema, deep vein thrombosis, familial hypercholesterolemia, opsonization, microcytic anemia, unstable angina, bleeding of skin, ischemic stroke, chronic pancreatitis, malaria, albuminuria, angina pectoris, vasculitis, degradation of connective tissue, cerebral malaria, thrombophilia, atypical hemolytic uremic syndrome, familial amyloidotic polyneuropathy, systemic amyloidosis, hypolipoproteinemia, ST-elevation myocardial infarction, focal necrosis of liver, mixed hyperlipidemia, Stevens-Johnson syndrome, pulmonary embolism, agammaglobulinemia, infection by cytomegalovirus, disorder of menstruation, abnormal morphology of mesangial matrix, injury of intestine, activation of vascular endothelial cells, thrombosis of artery, hip fracture, immune response of peritoneal macrophages, acquired immunodeficiency syndrome, autoimmune pancreatitis, damage of blood vessel, purpura, benign thyroid nodule, familial dementia, abdominal aortic aneurysm, recurrent venous thrombosis, hemorrhagic stroke, heparin-induced thrombocytopenia, Finnish type amyloidosis, placental insufficiency, portal vein thrombosis, injury of myocardium, non-ST elevation myocardial infarction, acute immune thrombocytopenic purpura, chronic immune thrombocytopenic purpura, congenital agammaglobulinemia, fetal erythroblastosis, hereditary thrombophilia, recurrent sinopulmonary infection, chronic idiopathic thrombocytopenic purpura, thrombosis of kidney, vascular injury, abnormal aggregation of blood platelets, acute pulmonary embolism, neonatal alloimmune, thrombocytopenia, whooping cough, congenital heart block, familial combined hyperlipidemia, Devic's syndrome, toxic epidermal necrolysis, hematoma, hyperplasia of vascular smooth muscle cells, Rasmussen's encephalitis, hyper-igm immunodeficiency syndrome, chronic inflammatory demyelinating polyradiculoneuropathy, microalbuminuria, acute phase atypical hemolytic uremic syndrome, bleeding of abdominal aorta, recurrent deep vein thrombosis, recurrent thromboembolism, stage 2 acute myocardial infarction, transfusion related acute lung injury.

[0079] Other non-limiting examples of diseases include disorders associated with function or development such as Acute Phase Response Signaling, LXR/RXR Activation, FXR/RXR Activation, Coagulation System, Complement System, Clathrin-mediated Endocytosis Signaling, Atherosclerosis Signaling, IL-12 Signaling and Production in Macrophages, Production of Nitric Oxide and Reactive Oxygen Species in Macrophages, Intrinsic Prothrombin Activation Pathway, Extrinsic Prothrombin Activation Pathway, Neuroprotective Role of THOP1 in Alzheimer's Disease, Hematopoiesis from Pluripotent Stem Cells, Primary Immunodeficiency Signaling, Systemic Lupus Erythematosus Signaling, Role of Pattern, Recognition Receptors in Recognition of Bacteria and Viruses, TR/RXR Activation, Role of Tissue Factor in Cancer, MSP-RON Signaling Pathway, Glioma Invasiveness Signaling, Caveolar-mediated Endocytosis Signaling, Communication between Innate and Adaptive Immune Cells and phagosome formation.

[0080] Other non-limiting examples of diseases include disorders associated with function or development such as cell movement, proliferation of cells, migration of cells, quantity of cells, organismal death, development of vasculature, transport of molecule, leukocyte migration, inflammatory response, activation of cells, morphology of body cavity, adhesion of blood cells, concentration of lipid, generation of cells, movement of myeloid cells, cell movement of phagocytes, fatty acid metabolism, synthesis of lipid, angiogenesis, quantity of blood cells, cellular homeostasis, aggregation of cells, metabolism of protein, aggregation of blood cells, adhesion of immune cells, binding of cells, metabolism of reactive oxygen species, activation of blood cells, vasculogenesis, abnormal morphology of body cavity, synthesis of reactive oxygen species, cell movement of neutrophils, quantity of metal, catabolism of protein, neurological signs, activation of leukocytes, coagulation, aggregation of blood platelets, quantity of leukocytes, coagulation of blood, Bleeding, quantity of steroid, immune response of cells, survival of organism, transport of lipid, synthesis of fatty acid, size of lesion, engulfment of cells, cellular infiltration, chemotaxis, binding of blood cells, activation of myeloid cells, activation of phagocytes, quantity of carbohydrate, ion homeostasis of cells, growth of epithelial tissue, transport of steroid, export of molecule, concentration of sterol, cellular infiltration by leukocytes, quantity of Ca2+, quantity of phagocytes, quantity of myeloid cells, secretion of molecule, morphology of connective tissue, cytolysis, flux of Ca2+, immune response of leukocytes, accumulation of cells, recruitment of cells, endothelial cell development, adhesion of myeloid cells, generation of reactive oxygen species, migration of phagocytes, concentration of fatty acid, proliferation of endothelial cells, activation of antigen presenting cells, concentration of triacylglycerol, recruitment of leukocytes, production of reactive oxygen species, quantity of protein in blood, Organ Degeneration, efflux of cholesterol, adhesion of phagocytes, synthesis of eicosanoid, response of myeloid cells, phagocytosis of cells, concentration of cholesterol, metabolism of membrane lipid derivative, morphology of blood cells, binding of phagocytes, permeability of vasculature, synthesis of prostaglandin, homeostasis of lipid, release of lipid, immune response of phagocytes, activation of macrophages, steroid metabolism, recruitment of phagocytes, accumulation of leukocytes, proteolysis, cell movement of macrophages, recruitment of myeloid cells, endocytosis by eukaryotic cells, quantity of granulocytes, complement activation, transport of phospholipid, size of atherosclerotic lesion, binding of endothelial cells, binding of professional phagocytic cells, cell movement of monocytes, hydrolysis of lipid, quantity of reactive oxygen species, secretion of lipid, influx of Ca2+, Shock Response, quantity of neutrophils, synthesis of nitric oxide, mass of organism, function of cardiovascular system, efflux of phospholipid, esterification of cholesterol, adhesion of blood platelets, quantity of protein lipid complex in blood, experimentally, induced diabetes, permeability of blood vessel, adhesion of granulocytes, metabolism of hydrogen, peroxide, binding of myeloid cells, metabolism of acylglycerol, uptake of lipid, engulfment of leukocytes, accumulation of myeloid cells, immune response of antigen presenting cells, recruitment of granulocytes, internalization of cells, metabolism of phospholipid, molecular cleavage of protein fragment, synthesis of steroid, area of atherosclerotic lesion, abortion, binding of blood platelets, quantity of hdl cholesterol in blood, adhesion of neutrophils, chemotaxis of monocytes, biosynthesis of hydrogen peroxide, metabolism of triacylglycerol, activation of blood platelets, metabolism of cholesterol, cell movement of epithelial cell lines, activation of neuroglia, accumulation of phagocytes, migration of granulocytes, phagocytosis of phagocytes, phagocytosis of myeloid cells, conversion of lipid, migration of muscle cells, metabolism of phosphatidic acid, migration of antigen presenting cells, healing of wound, size of infarct, proliferation of liver cells, recruitment of neutrophils, quantity of macrophages, habitual abortion, secretion of triacylglycerol, quantity of superoxide, binding of vascular endothelial cells, peroxidation of lipid, activation of endothelial cells, quantity of blood vessel, injury of cells, binding of lipid, binding of carbohydrate, injury of kidney, homeostasis of cholesterol, response of granulocytes, cell movement of embryonic cell lines, activation of granulocytes, adhesion of epithelial cells, immune response of T lymphocytes, phagocytosis of antigen presenting cells, quantity of muscle, synthesis of prostaglandin E2, formation of blood vessel, release of eicosanoid, transport of heavy metal, cell movement of leukemia cell lines, cell movement of kidney cell lines, receptor-mediated endocytosis, migration of smooth muscle cells, transmission of lipid, concentration of cholesterol ester, respiratory burst of granulocytes, adhesion of kidney cell lines, neovascularization of choroid, quantity of ldl, cholesterol in blood, relaxation of artery, recruitment of monocytes, function of blood platelets, synthesis of cyclic GMP, flow of blood, binding of polysaccharide, synthesis of cholesterol, binding of, antigen presenting cells, generation of superoxide, production of hydrogen peroxide, accumulation of macrophages, immune response of neutrophils, formation of reactive oxygen species, release of arachidonic acid, growth of bacteria, activation of neutrophils, quantity of heavy metal, damage of connective tissue, release of cholesterol, uptake of cholesterol ester, activation of carbohydrate, coagulation of plasma, quantity of lysophosphatidylcholine, metabolism of lipoprotein, internalization of lipid, movement of macrophage cancer cell lines, binding of cell surface, hydrolysis of triacylglycerol, respiratory burst of neutrophils, adhesion of embryonic cell lines, migration of eosinophils, quantity of endothelial cells, metabolism of phosphatidylcholine, binding of neutrophils, clearance of lipid, adhesion of epithelial cell lines, quantity of smooth muscle cells, adhesion of monocytes, recruitment of phospholipid, stimulation of endothelial tissue, surface area of atherosclerotic lesion, activation of inflammatory leukocytes, concentration of lipopolysaccharide, import of cholesterol, opsonization of cells, relaxation of coronary artery, synthesis of 12(S)-hydroxyeicosatetraenoic acid, lysis of blood clot, agglutination of blood cells, synthesis of 6-keto-prostaglandin F1 alpha, formation of plaque, release of phosphatidic acid, classical complement pathway, clearance of triacylglycerol, synthesis of corticosterone, activated partial thromboplastin time of plasma, auto-oxidation of amino acids, complement component C1s deficiency, delay in renal and urological disorder, density of artery, recruitment of phosphatidic acid.

[0081] The term “phenotype” as used herein comprises the composite of an organism's observable characteristics or traits, such as its morphology, development, biochemical or physiological properties, phenology, behavior, and products of behavior.

[0082] The term “diagnosis,” or “dx,” refers to the identification of the nature and cause of a certain phenomenon. As used herein, a diagnosis typically refers to a medical diagnosis, which is the process of determining which disease or condition explains a symptoms and signs. A diagnostic procedure, often a diagnostic test or assay, can be used to provide a diagnosis. A diagnosis can comprise detecting the presence of a disease or disorder. A diagnosis can comprise detecting the presence of a disease or disorder, or condition.

[0083] The term “prognosis,” or “px,” as used herein refers to predicting the likely outcome of a current standing. For example, a prognosis can include the expected duration and course of a disease or disorder, such as progressive decline or expected recovery.

[0084] The term “theranosis,” or “tx” as used herein refers to a diagnosis or prognosis used in the context of a medical treatment. For example, theranostics can include diagnostic testing used for selecting appropriate and optimal therapies (or the inverse) based on the context of genetic content or other molecular or cellular analysis. Theranostics includes pharmacogenomics, personalized and precision medicine.

[0085] “Beneficial results” may include, but are in no way limited to, lessening or alleviating the severity of the disease condition, preventing the disease condition from worsening, curing the disease condition, preventing the disease condition from developing, lowering the chances of a patient developing the disease condition and prolonging a patient's life or life expectancy. Beneficial or desired clinical results include, but are not limited to, alleviation of one or more symptom(s), diminishment of extent of the deficit, stabilized (i.e., not worsening) state of progression, delay or slowing of progression or invasiveness, and amelioration or palliation of symptoms associated with the brain insulin resistance. Treatment also includes a decrease in mortality or an increase in the lifespan of a subject as compared to one not receiving the treatment.

[0086] As used herein, the terms “treat,” “treatment,” “treating,” or “amelioration” refer to therapeutic treatments, wherein the object is to reverse, alleviate, ameliorate, inhibit, slow down or stop the progression or severity of a condition associated with, a disease or disorder. The term “treating” includes reducing or alleviating at least one adverse effect or symptom of a condition, disease or disorder described herein. Treatment is generally “effective” if one or more symptoms are reduced. Alternatively, treatment is “effective” if the progression of a disease is reduced or halted. That is, “treatment” includes not just the improvement of symptoms, but also a cessation of at least slowing of progress or worsening of symptoms that would be expected in absence of treatment. Beneficial or desired clinical results include, but are not limited to, alleviation of one or more symptom(s), diminishment of extent of disease, stabilized (i.e., not worsening) state of disease, delay or slowing of disease progression, amelioration or palliation of the disease state, and remission (whether partial or total), whether detectable or undetectable. The term “treatment” of a disease also includes providing relief from the symptoms or side-effects of the disease (including palliative treatment). As used herein, the terms “treat,” “treatment,” “treating,” or “amelioration” refer to therapeutic treatments and prophylactic or preventative measures, wherein the object is to reverse, alleviate, ameliorate, inhibit, slow down or stop the progression or severity of a condition associated with, a disease or disorder. The term “treating” includes reducing or alleviating at least one adverse effect or symptom of a condition, disease or disorder described herein. Treatment is generally “effective” if one or more symptoms are reduced. Alternatively, treatment is “effective” if the progression of a disease, disorder, or condition is reduced or halted. That is, “treatment” includes not just the improvement of symptoms, but also a cessation of at least slowing of progress or worsening of symptoms that would be expected in absence of treatment. Also, “treatment” may mean to pursue or obtain beneficial results, or lower the chances of the individual developing the condition, disease, or disorder even if the treatment is ultimately unsuccessful. Beneficial or desired clinical results include, but are not limited to, alleviation of one or more symptom(s), diminishment of extent of disease, stabilized (i.e., not worsening) state of disease, delay or slowing of disease progression, amelioration or palliation of the disease state, and remission (whether partial or total), whether detectable or undetectable. The term “treatment” of a disease also includes providing relief from the symptoms or side-effects of the disease (including palliative treatment). Those in need of treatment include those already with the condition, disease, or disorder as well as those prone to have the condition, disease, or disorder or those in whom the condition, disease, or disorder is to be prevented.

[0087] Non-limiting examples of treatments or therapeutic treatments include pharmacological or biological therapies and/or interventional surgical treatments.

[0088] The term “preventative treatment” means maintaining or improving a healthy state or non-diseased state of a healthy subject or subject that does not have a disease. The term “preventative treatment” or “health surveillance” also means to prevent or to slow the appearance of symptoms associated with a condition, disease, or disorder. The term “preventative treatment” also means to prevent or slow a subject from obtaining a condition, disease, or disorder.

[0089] As used herein, the term “administering,” refers to the placement of an agent as disclosed herein into a subject by a method or route which results in at least partial localization of the agents at a desired site. “Route of administration” may refer to any administration pathway known in the art, including but not limited to aerosol, nasal, via inhalation, oral, anal, intra-anal, peri-anal, transmucosal, transdermal, parenteral, enteral, topical or local. “Parenteral” refers to a route of administration that is generally associated with injection, including intratumoral, intracranial, intraventricular, intrathecal, epidural, intradural, intraorbital, infusion, intracapsular, intracardiac, intradermal, intramuscular, intraperitoneal, intrapulmonary, intraspinal, intrasternal, intrathecal, intrauterine, intravascular, intravenous, intraarterial, subarachnoid, subcapsular, subcutaneous, transmucosal, or transtracheal. Via the parenteral route, the compositions may be in the form of solutions or suspensions for infusion or for injection, or as lyophilized powders. Via the enteral route, the pharmaceutical compositions can be in the form of tablets, gel capsules, sugar-coated tablets, syrups, suspensions, solutions, powders, granules, emulsions, microspheres or nanospheres or lipid vesicles or polymer vesicles allowing controlled release. Via the topical route, the pharmaceutical compositions can be in the form of aerosol, lotion, cream, gel, ointment, suspensions, solutions or emulsions. In accordance with the present invention, “administering” can be self-administering. For example, it is considered as “administering” that a subject consumes a composition as disclosed herein.

[0090] “Diagnostic” means identifying the presence or nature of a pathologic condition, disease, or disorder and includes identifying patients who are at risk of developing a specific condition, disease or disorder. Diagnostic methods differ in their sensitivity and specificity. The “sensitivity” of a diagnostic assay is the percentage of diseased individuals who test positive (percent of “true positives”). Diseased individuals not detected by the assay are “false negatives.” Subjects who are not diseased and who test negative in the assay, are termed “true negatives.” While a particular diagnostic method may not provide a definitive diagnosis of a condition, a disease, or a disorder, it suffices if the method provides a positive indication that aids in diagnosis.

[0091] By “at risk of” is intended to mean at increased risk of, compared to a normal subject, or compared to a control group, e.g. a patient population. Thus a subject carrying a particular marker may have an increased risk for a specific condition, disease or disorder, and be identified as needing further testing. “Increased risk” or “elevated risk” mean any statistically significant increase in the probability, e.g., that the subject has the disorder. The risk is preferably increased by at least 10%, more preferably at least 20%, and even more preferably at least 50% over the control group with which the comparison is being made.

[0092] The term “statistically significant” or “significantly” refers to statistical evidence that there is a difference. It is defined as the probability of making a decision to reject the null hypothesis when the null hypothesis is actually true. The decision is often made using the p-value.

[0093] The terms “detection”, “detecting” and the like, may be used in the context of detecting biomarkers, detecting peptides, detecting proteins, or of detecting a condition, detecting a disease or a disorder.

[0094] The terms “proteases” and “peptidases” are used interchangeably herein to mean enzymes that breakdown proteins and peptides.

[0095] The terms “marker” or “biomarker” are used interchangeably herein, and in the context of the present invention refer to a protein or peptide (for example, protein or peptide associated with a disease, function, pathological process, or physiological process) is differentially present in a sample taken from patients having a specific disease or disorder as compared to a control value, the control value consisting of, for example average or mean values in comparable samples taken from control subjects (e.g., a person with a negative diagnosis, normal or healthy subject). Biomarkers may be determined as specific peptides or proteins which may be detected by mass spectroscopy. In some applications, for example, a mass spectroscopy may be used to determine multiple biomarkers, and differences between individual biomarkers and/or the partial or complete profile may be used for diagnosis.

[0096] A “test amount” of a marker refers to an amount of a marker present in a sample being tested. A test amount can be either in absolute amount (e.g., μg/ml) or a relative amount (e.g., relative intensity of signals).

[0097] A “diagnostic amount” of a marker refers to an amount of a marker in a subject's sample that is consistent with a diagnosis of a particular disease or disorder or function or pathological process or physiological process. A diagnostic amount can be either in absolute amount (e.g., μg/ml) or a relative amount (e.g., relative intensity of signals).

[0098] A “control amount” of a marker can be any amount or a range of amount which is to be compared against a test amount of a marker. For example, a control amount of a marker can be the amount of a marker in a person who does not suffer from the disease or disorder or function or pathological process or physiological process sought to be diagnosed. A control amount can be either in absolute amount (e.g., μg/ml) or a relative amount (e.g., relative intensity of signals).

[0099] The term “differentially present” or “change in level” refers to differences in the quantity and/or the frequency of a marker present in a sample taken from patients having a specific disease or disorder or function or pathological process or physiological process as compared to a control subject. For example, a marker can be present at an elevated level or at a decreased level in samples of patients with the disease or disorder or pathological process or physiological process compared to a control value (e.g. determined from samples of control subjects). Alternatively, a marker can be detected at a higher frequency or at a lower frequency in samples of patients compared to samples of control subjects.

[0100] A marker, compound, composition or substance is differentially present in a sample if the amount of the marker, compound, composition or substance in the sample is statistically significantly different from the amount of the marker, compound, composition or substance in another sample, or from a control value. For example, a compound is differentially present if it is present at least about 120%, at least about 130%, at least about 150%, at least about 180%, at least about 200%, at least about 300%, at least about 500%, at least about 700%, at least about 900%, or at least about 1000% greater or less than it is present in the other sample (e.g. control), or if it is detectable in one sample and not detectable in the other.

[0101] Alternatively or additionally, a marker, compound, composition or substance is differentially present between samples if the frequency of detecting the marker, etc. in samples of patients suffering from a particular disease or disorder or function or pathological process or physiological process, is statistically significantly higher or lower than in the control samples or control values obtained from healthy individuals. For example, a biomarker is differentially present between the two sets of samples if it is detected at least about 10%, at least about 20%, at least about 30%, at least about 40%, at least about 50%, at least about 60%, at least about 70%, at least about 80%, at least about 90%, or at least about 100% more frequently or less frequently observed in one set of samples than the other set of samples. These exemplary values notwithstanding, it is expected that a skilled practitioner can determine cut-off points, etc. that represent a statistically significant difference to determine whether the marker is differentially present.

[0102] General molecular biology terminology and techniques are known to those of skill in the art. See, e.g., Sambrook et al., Molecular Cloning: A Laboratory Manual, Cold Spring Harbor Press, N.Y., (3.sup.rd ed., 2000); and Brent et al., Current Protocols in Molecular Biology, John Wiley & Sons, Inc. (ringbou ed., 2003).

[0103] Abbreviations: MS, Mass Spectrometry; LC-MS/MS, liquid chromatography-tandem mass spectrometry; LC-SRM-MS, liquid chromatography selected reaction monitoring mass spectrometry; OGS, N-octyl glucoside; MMTS, Methyl methanethiosulfonate; TCEP, Tris-(2-carboxyethyl)-phosphine; FA, Formic acid; TPCK treated trypsin, Trypsin treated with L-(tosylamido-2-phenyl) ethyl chloromethyl ketone; β-Gal, β-galactosidase; CV %. Coefficient of variation; LC-SRM-MS, Liquid chromatography-selected reaction monitoring mass spectrometry; SIL peptide, Stable Isotope-Labeled Peptide; DIA-MS, Data Independent acquisition mass spectrometry; SPE, solid phase extraction; IQ panel, internal quality panel.

[0104] Phenotypes

[0105] As described herein, the compositions and methods of the invention may be used to characterize a phenotype in a sample of interest. The phenotype can be any phenotype of interest that may be characterized using the subject compositions and methods. Consider a non-limiting example wherein the phenotype comprises a disease or disorder. In such cases, the characterizing may be providing a diagnosis, prognosis or theranosis for the disease or disorder. In an illustrative embodiment, a sample from a subject is analyzed using the compositions and methods of the invention. The analysis is then used to predict or determine the presence, stage, grade, outcome, or likely therapeutic response of a disease or disorder in the subject. The analysis can also be used to assist in making such prediction or determination. As described herein, the compositions, methods, protein panels, articles of manufacture, or systems of the invention may be used to characterize a phenotype in a sample of interest. The phenotype can be any phenotype of interest that may be characterized using the subject compositions, methods, protein panels, articles of manufacture, or systems. Consider a non-limiting example wherein the phenotype comprises a disease or disorder. In such cases, the characterizing may be providing a diagnosis, prognosis or theranosis for the disease or disorder. In an illustrative embodiment, a sample from a subject is analyzed using the compositions, methods, protein panels, articles of manufacture, or systems of the invention. The analysis is then used to predict or determine the presence, stage, grade, outcome, or likely therapeutic response of a disease or disorder in the subject. The analysis can also be used to assist in making such prediction or determination.

[0106] In various embodiments the invention provides a method to identify protein biomarkers and patterns that are indicative a disease is or may be present. In some embodiments these methods may provide objective rationale for further testing. In various embodiments the invention provides a method for the identification of a plurality of proteins from a sample, wherein each protein is correlated to one or more peptides, wherein each peptide is correlated to one or more transitions, wherein each transition comprises a Q1 mass value and a Q3 mass value. In various embodiments the invention provides a method for the identification of a plurality of proteins from a sample, wherein each protein is correlated to one or more peptides, wherein each peptide is correlated to one or more transitions, wherein each transition comprises a Q1/Q3 mass value pair.

[0107] As used herein, SRM stands for selected reaction monitoring. As used herein, MRM stands for multiple reaction monitoring. As used herein, SWATH stands for sequential window acquisition of all theoretical fragment ion spectra. As used herein, DIA stands for data-independent analysis. As used herein, MS stands for mass spectrometry. As used herein, SIL stands for stable isotope-labeled. As used herein, DDA stands for data-dependent analysis. As used herein, PRM stands for parallel reaction monitoring.

[0108] As used herein, “MS data” can be raw MS data obtained from a mass spectrometer and/or processed MS data in which peptides and their fragments (e.g., transitions and MS peaks) are already identified, analyzed and/or quantified. MS data can be Selective Reaction Monitoring (SRM) data, Multiple Reaction Monitoring (MRM) data, Shotgun CID MS data, Original DIA MS Data, MSE MS data, p2CID MS Data, PAcIFIC MS Data, AIF MS Data, XDLA MS Data, SWATH MS data, or FT-ARM MS Data, or their combinations.

[0109] This approach of the present invention, based on SRM and/or SWATH MS, allows for the detection and accurate quantification of specific peptides in complex mixtures.

[0110] Selected Reaction Monitoring or Multiple Reaction Monitoring (SRM/MRM) mass spectrometry is a technology with the potential for reliable and comprehensive quantification of substances of low abundance in complex samples. SRM is performed on triple quadrupole-like instruments, in which increased selectivity is obtained through collision-induced dissociation. It is a non-scanning mass spectrometry technique, where two mass analyzers (Q1 and Q3) are used as static mass filters, to monitor a particular fragment of a selected precursor. On triple quadrapole instruments, various ionization methods can be used including without limitation electrospray ionization, chemical ionization, electron ionization, atmospheric pressure chemical ionization, and matrix-assisted laser desorption ionization. Both the first mass analyzer and the collision cell are continuously exposed to ions from the source in a time dependent manner. Once the ions move into the third mass analyzer time dependence becomes a factor. On triple quadrupole instruments, the first quadrapole mass filter, Q1, is the primary m/z selector after the sample leaves the ionization source. Any ions with mass-to-charge ratios other than the one selected for will not be allowed to infiltrate Q1. The collision cell, denoted as “q2”, located between the first quadrapole mass filter Q1 and second quadrapole mass filter Q3, is where fragmentation of the sample occurs in the presence of an inert gas like argon, helium, or nitrogen. Upon exiting the collision cell, the fragmented ions then travel onto the second quadrapole mass filter Q3, where m/z selection can occur again. The specific pair of mass-over-charge (m/z) values associated to the precursor and fragment ions selected is referred to as a “transition”. The detector acts as a counting device for the ions matching the selected transition thereby returning an intensity distribution over time. MRM is when multiple SRM transitions are measured within the same experiment on the chromatographic time scale by rapidly switching between the different precursor/fragment pairs. Typically, the triple quadrupole instrument cycles through a series of transitions and records the signal of each transition in relation to the elution time. The method allows for additional selectivity by monitoring the chromatographic co-elution of multiple transitions for a given analyte.

[0111] SWATH MS a data independent acquisition (DIA) method which aims to complement traditional mass spectrometry-based proteomics techniques such as shotgun and SRM methods. In essence, it allows a complete and permanent recording of all fragment ions of the detectable peptide precursors present in a biological sample. It thus combines the advantages of shotgun (high throughput) with those of SRM (high reproducibility and consistency).

[0112] In a preferred embodiment, the developed methods herein can be applied to the quantification of polypeptides(s) in biological sample(s). Any kind of biological samples comprising polypeptides can be the starting point and be analyzed by the methods herein. Indeed, any protein/peptide containing sample can be used for and analyzed by the methods produced here (cells, tissues, body fluids, waters, food, terrain, synthetic preparations, etc.). The methods herein can also be used with peptide mixtures obtained by digestion. Digestion of a polypeptide includes any kind of cleavage strategies, such as, enzymatic, chemical, physical or combinations thereof.

[0113] The deciding factors of which polypeptide will be the one of interest varies. It can be decided by performing a literature search and identifying proteins that are functionally related, are candidate protein biomarkers which can be used in screening for drug discovery, biomarker discovery and/or disease clinical phase trials or are diagnostic markers to screen for pharmaceutical/medical purposes. The polypeptide of interest may be determined by experimental analysis.

[0114] According to some embodiments, the following parameters of the methods provided herein are determined: trypsin digestion and peptide clean up, best responding polypeptides, best responding fragments, fragment intensity ratios (increased high and reproducible peak intensities), optimal collision energies, and all the optimal parameters to maximize sensitivity and/or specificity of the methods.

[0115] In other embodiments, quantification of the polypeptides and/or of the corresponding proteins or activity/regulation of the corresponding proteins is desired. A selected peptide is labeled with a stable-isotope and used as an internal standard to achieve absolute quantification of a protein of interest. The addition of a quantified stable-labeled peptide analogue of the tag to the peptide sample in known amount; and subsequently the tag and the peptide of interest is quantified by mass spectrometry and absolute quantification of the endogenous levels of the proteins is obtained.

[0116] According to a preferred embodiment, the analysis and/or comparison is done on protein samples of wild-type or physiological/healthy origin with protein samples of mutant or pathological origin.

[0117] The present invention supports the use of SRM and SWATH as platform to identify signature polypeptides for quantitative proteomics. The approach is applicable to the analysis of proteins from all organisms, from cells, organs, body fluids, and in the context of in vivo and/or in vitro analyses. Examples of applications of the invention include the development, use and commercialization of quantitative assays for sets of polypeptides of interest. The invention can be beneficial for the pharmaceutical industry (e.g. drug development and assessment), the biotechnology industry (e.g. assay design and development and quality control), and in clinical applications (e.g. identification of biomarkers of disease and quantitative analysis for diagnostic, prognostic and/or therapeutic use). The invention can also be applied to water, drink, food and food ingredient testing, for example, quantifying nutrients, contaminants, toxins, antibiotics, steroids, hormones, pathogens, and allergens in water, drinks, foods and food ingredients.

[0118] Methods of the Invention

[0119] Various embodiments of the present invention provide a method of obtaining a biomarker signature for a subject, the method comprising: obtaining a sample from the subject; treating the sample with a protease to obtain a digested sample; measuring in the digested sample a representation of one or more biomarkers to obtain the biomarker signature for the subject, wherein the measuring is performed using a mass spectrometer and a mass spectrometry technique, and the representation of the one or more biomarkers is a Q1 mass value and a Q3 mass value according to Table 5. Various embodiments of the present invention provide a method of obtaining a biomarker signature for a subject, the method comprising: obtaining a sample from the subject; treating the sample with a protease to obtain a digested sample; measuring in the digested sample a representation of one or more biomarkers to obtain the biomarker signature for the subject, wherein the measuring is performed using a mass spectrometer and a mass spectrometry technique, and the representation of the one or more biomarkers is a Q1/Q3 mass value pair according to Table 5. Various embodiments of the present invention provide a method of obtaining a biomarker signature for a subject, the method comprising: obtaining a sample from the subject; treating the sample with a protease to obtain a digested sample; measuring in the digested sample a representation of one or more biomarkers to obtain the biomarker signature for the subject, wherein the measuring is performed using a mass spectrometer and a mass spectrometry technique, and the representation of the one or more biomarkers is one or more Q1/Q3 mass value pairs according to Table 5. Various embodiments of the present invention provide a method of obtaining a biomarker signature for a subject, the method comprising: obtaining a sample from the subject; treating the sample with a protease to obtain a digested sample; measuring in the digested sample a representation of one or more biomarkers to obtain the biomarker signature for the subject, wherein the measuring is performed using a mass spectrometer and a mass spectrometry technique, and the representation of the one or more biomarkers is two or more Q1/Q3 mass value pairs according to Table 5. Various embodiments of the present invention provide a method of obtaining a biomarker signature for a subject, the method comprising: obtaining a sample from the subject; treating the sample with a protease to obtain a digested sample; measuring in the digested sample a representation of one or more biomarkers to obtain the biomarker signature for the subject, wherein the measuring is performed using a mass spectrometer and a mass spectrometry technique, and the representation of the one or more biomarkers is a Q1 mass value according to Table 5. Various embodiments of the present invention provide a method of obtaining a biomarker signature for a subject, the method comprising: obtaining a sample from the subject; treating the sample with a protease to obtain a digested sample; measuring in the digested sample a representation of one or more biomarkers to obtain the biomarker signature for the subject, wherein the measuring is performed using a mass spectrometer and a mass spectrometry technique, and the representation of the one or more biomarkers is one or more Q1 mass values according to Table 5. Various embodiments of the present invention provide a method of obtaining a biomarker signature for a subject, the method comprising: obtaining a sample from the subject; treating the sample with a protease to obtain a digested sample; measuring in the digested sample a representation of one or more biomarkers to obtain the biomarker signature for the subject, wherein the measuring is performed using a mass spectrometer and a mass spectrometry technique, and the representation of the one or more biomarkers is two or more Q1 mass values according to Table 5.

[0120] Various embodiments of the present invention provide a method of obtaining a biomarker signature for a subject, the method comprising: obtaining a sample from the subject; treating the sample with a protease to obtain a digested sample; measuring in the digested sample a representation of one or more biomarkers to obtain the biomarker signature for the subject, wherein the measuring is performed using a mass spectrometer and a mass spectrometry technique, and the representation of the one or more biomarkers is a Q1 mass value and a Q3 mass value according to Table 5. In some embodiments, the Q1 mass value and the Q3 mass value are correlated to the one or more peptides according to Table 5. In some embodiments, the one or more peptides are correlated to one or more proteins according to Table 5. In some embodiments, the one or more biomarkers are the one or more proteins according to Table 5. In some embodiments, the mass spectrometry technique is selected reaction monitoring (SRM) or multiple reaction monitoring (MRM). In some embodiments, the mass spectrometry technique is liquid chromatography-selected reaction monitoring-mass spectrometry (LC-SRM-MS). In some embodiments, the mass spectrometry technique is data-independent acquisition mass spectrometry (DIA MS). In some embodiments, the method further comprises comparing the biomarker signature from the subject to a biomarker signature from a reference sample. In some embodiments, the method further comprises making an assessment of the subject based on the comparison, wherein the assessment is a diagnosis of a disease. In some embodiments, the mass spectrometer is a triple quadrupole mass spectrometer. In some embodiments, the reference sample is obtained from a control subject, wherein the control subject does not have the disease. In some embodiments, the reference sample is obtained from the subject before the subject is treated for the disease. In some embodiments, the reference sample is from a subject that has been successfully treated for the disease.

[0121] Various embodiments of the present invention provide a method of obtaining a biomarker signature for a subject, the method comprising: obtaining a sample from the subject; treating the sample with a protease to obtain a digested sample; measuring in the digested sample a representation of one or more biomarkers to obtain the biomarker signature for the subject, wherein the measuring is performed using a mass spectrometer and a mass spectrometry technique, and the representation of the one or more biomarkers is a Q1/Q3 mass value pair according to Table 5. In some embodiments, the Q1/Q3 mass value pairs are correlated to the one or more peptides according to Table 5. In some embodiments, the one or more peptides are correlated to one or more proteins according to Table 5. In some embodiments, the one or more biomarkers are the one or more proteins according to Table 5. In some embodiments, the Q1/Q3 mass value pair is one or more Q1/Q3 mass value pairs. In some embodiments, the Q1/Q3 mass value pair is two or more Q1/Q3 mass value pairs. In some embodiments, the mass spectrometry technique is selected reaction monitoring (SRM) or multiple reaction monitoring (MRM). In some embodiments, the mass spectrometry technique is liquid chromatography-selected reaction monitoring-mass spectrometry (LC-SRM-MS). In some embodiments, the mass spectrometry technique is data-independent acquisition mass spectrometry (DIA MS). In some embodiments, the method further comprises comparing the biomarker signature from the subject to a biomarker signature from a reference sample. In some embodiments, the method further comprises making an assessment of the subject based on the comparison, wherein the assessment is a diagnosis of a disease. In some embodiments, the mass spectrometer is a triple quadrupole mass spectrometer. In some embodiments, the reference sample is obtained from a control subject, wherein the control subject does not have the disease. In some embodiments, the reference sample is obtained from the subject before the subject is treated for the disease. In some embodiments, the reference sample is from a subject that has been successfully treated for the disease.

[0122] Various embodiments of the invention provide method of treating a subject for a disease, the method comprising: (a) making an assessment of the subject based on the biomarker signature, wherein the assessment is a diagnosis of the disease; and (b) treating the subject based on the assessment, wherein the biomarker signature is obtained by obtaining a sample from the subject; treating the sample with a protease to obtain a digested sample; measuring in the digested sample a representation of one or more biomarkers to obtain the biomarker signature for the subject, wherein the measuring is performed using a mass spectrometer and a mass spectrometry technique, and the representation of the one or more biomarkers is a Q1 mass value and a Q3 mass value according to Table 5.

[0123] Various embodiments of the invention provide method of treating a subject for a disease, the method comprising: (a) making an assessment of the subject based on the biomarker signature, wherein the assessment is a diagnosis of the disease; and (b) treating the subject based on the assessment, wherein the biomarker signature is obtained by obtaining a sample from the subject; treating the sample with a protease to obtain a digested sample; measuring in the digested sample a representation of one or more biomarkers to obtain the biomarker signature for the subject, wherein the measuring is performed using a mass spectrometer and a mass spectrometry technique, and the representation of the one or more biomarkers is a Q1/Q3 mass value pair according to Table 5. In some embodiments, the Q1/Q3 mass value pair is one or more Q1/Q3 mass value pairs. In some embodiments, the Q1/Q3 mass value pair is two or more Q1/Q3 mass value pairs.

[0124] Various embodiments of the invention provide method of treating a subject for a disease, the method comprising: (a) making an assessment of the subject based on the biomarker signature, wherein the assessment is a diagnosis of the disease; and (b) treating the subject based on the assessment, wherein the biomarker signature is obtained by obtaining a sample from the subject; treating the sample with a protease to obtain a digested sample; measuring in the digested sample a representation of one or more biomarkers to obtain the biomarker signature for the subject, wherein the measuring is performed using a mass spectrometer and a mass spectrometry technique, and the representation of the one or more biomarkers is a Q1 mass value according to Table 5. In some embodiments, the Q1 mass value is one or more Q1 mass values. In some embodiments, the Q1 mass value is two or more Q1 mass values.

[0125] Various embodiments of the present invention provide a method of identifying a plurality of biomarkers in a sample, comprising: obtaining a sample from the subject; treating the sample with a protease to obtain a digested sample; measuring in the digested sample a representation of one or more biomarkers to obtain the biomarker signature for the subject, wherein the measuring is performed using a mass spectrometer and a mass spectrometry technique, and the representation of the one or more biomarkers is a Q1 mass value and a Q3 mass value according to Table 5.

[0126] Various embodiments of the present invention provide a method of identifying a plurality of biomarkers in a sample, comprising: obtaining a sample from the subject; treating the sample with a protease to obtain a digested sample; measuring in the digested sample a representation of one or more biomarkers to obtain the biomarker signature for the subject, wherein the measuring is performed using a mass spectrometer and a mass spectrometry technique, and the representation of the one or more biomarkers is a Q1/Q3 mass value pair according to Table 5. In some embodiments, the Q1/Q3 mass value pair is one or more Q1/Q3 mass value pairs. In some embodiments, the Q1/Q3 mass value pair is two or more Q1/Q3 mass value pairs.

[0127] Various embodiments of the present invention provide a method of identifying a plurality of biomarkers in a sample, comprising: obtaining a sample from the subject; treating the sample with a protease to obtain a digested sample; measuring in the digested sample a representation of one or more biomarkers to obtain the biomarker signature for the subject, wherein the measuring is performed using a mass spectrometer and a mass spectrometry technique, and the representation of the one or more biomarkers is a Q1 mass value according to Table 5. In some embodiments, the Q1 mass value is one or more Q1 mass values. In some embodiments, the Q1 mass value is two or more Q1 mass values.

[0128] Various embodiments of the present invention provide a method of early screening for a plurality of biomarkers in a sample, comprising: obtaining a sample from the subject; treating the sample with a protease to obtain a digested sample; measuring in the digested sample a representation of one or more biomarkers to obtain the biomarker signature for the subject, wherein the measuring is performed using a mass spectrometer and a mass spectrometry technique, and the representation of the one or more biomarkers is a Q1 mass value and a Q3 mass value according to Table 5.

[0129] Various embodiments of the present invention provide a method of early screening for a plurality of biomarkers in a sample, comprising: obtaining a sample from the subject; treating the sample with a protease to obtain a digested sample; measuring in the digested sample a representation of one or more biomarkers to obtain the biomarker signature for the subject, wherein the measuring is performed using a mass spectrometer and a mass spectrometry technique, and the representation of the one or more biomarkers is a Q1/Q3 mass value pair according to Table 5. In some embodiments, the Q1/Q3 mass value pair is one or more Q1/Q3 mass value pairs. In some embodiments, the Q1/Q3 mass value pair is two or more Q1/Q3 mass value pairs.

[0130] Various embodiments of the present invention provide a method of early screening for a plurality of biomarkers in a sample, comprising: obtaining a sample from the subject; treating the sample with a protease to obtain a digested sample; measuring in the digested sample a representation of one or more biomarkers to obtain the biomarker signature for the subject, wherein the measuring is performed using a mass spectrometer and a mass spectrometry technique, and the representation of the one or more biomarkers is a Q1 mass value according to Table 5. In some embodiments, the Q1 mass value is one or more Q1 mass values. In some embodiments, the Q1 mass value is two or more Q1 mass values.

[0131] Various embodiments of the present invention provide a method of diagnosing a disease in a subject, comprising: treating the sample with a protease to obtain a digested sample; measuring the amount of at least one biomarker in the digested sample using a mass spectrometer and a mass spectrometry technique, wherein the at least one biomarker is one or more peptides; and comparing the amount of at least one biomarker measured in the digested sample to a reference amount in a normal subject population, wherein a change in the amount, compared to the reference amount, is indicative of the disease. In some embodiments the mass spectrometer is a triple quadrupole mass spectrometer. In some embodiments, the triple quadrupole mass spectrometer comprises a quadrupole mass filter Q1 and a quadrupole mass filter Q3, wherein the quadrupole mass filter Q1 has a Q1 mass value and the quadrupole mass filter Q3 has a Q3 mass value. In some embodiments, the Q1 mass value and the Q3 mass value are correlated to the one or more peptides according to Table 5. In some embodiments, the one or more peptides are correlated to one or more proteins according to Table 5. In some embodiments, the mass spectrometry technique is selected reaction monitoring (SRM) or multiple reaction monitoring (MRM). In some embodiments, the mass spectrometry technique is liquid chromatography-selected reaction monitoring-mass spectrometry (LC-SRM-MS). In some embodiments, the mass spectrometry technique is data-independent acquisition mass spectrometry (DIA MS). In some embodiments, the change is an increase or decrease in the amount of at least one biomarker compared to the reference amount.

[0132] Various embodiments of the present invention provide a method of obtaining a biomarker signature for a subject, the method comprising: obtaining a sample from the subject; treating the sample with a protease to obtain a digested sample; and measuring in the digested sample a representation of one or more biomarkers to obtain the biomarker signature for the subject, wherein the measuring is performed using a mass spectrometer and a mass spectrometry technique, and the representation of the one or more biomarkers is obtained using a mass spectrometry assay, wherein the mass spectrometry assay comprises a quantitation of a Q1/Q3 mass value pair according to Table 5, wherein the Q1/Q3 mass value pair is used to quantify a corresponding peptide and protein according to Table 5. In some embodiments, the Q1/Q3 mass value pair is one or more the Q1/Q3 mass value pairs. In some embodiments, the Q1/Q3 mass value pair is two or more the Q1/Q3 mass value pairs. In some embodiments, the protease is trypsin, chymotrypsin, endoproteinase Lys-C, endoproteinase Asp-N, pepsin, thermolysin, papain, proteinase K, subtilisin, clostripain, exopeptidase, carboxypeptidase, cathepsin C, cyanogen bromide, formic acid, hydroxylamine, or NTCB, or a combination thereof. In some embodiments, the protease is trypsin. In some embodiments, the mass spectrometer is a triple quadrupole mass spectrometer. In some embodiments, each Q1/Q3 mass value pair are correlated to the one or more peptides according to Table 5. In some embodiments, the one or more peptides are correlated to one or more proteins according to Table 5. In some embodiments, the one or more biomarkers are the one or more proteins according to Table 5. In some embodiments, the mass spectrometry technique is selected reaction monitoring (SRM) or multiple reaction monitoring (MRM). In some embodiments, the mass spectrometry technique is liquid chromatography-selected reaction monitoring-mass spectrometry (LC-SRM-MS). In some embodiments, the mass spectrometry technique is data-independent acquisition mass spectrometry (DIA MS). In some embodiments, the method further comprises adding a stable-isotope labeled peptide standard to the sample. In some embodiments, the method further comprises comparing the biomarker signature from the subject to a biomarker signature from a reference sample. In some embodiments, the method further comprises making an assessment of the subject based on the comparison, wherein the assessment is a diagnosis of a disease. In some embodiments, the sample is plasma, serum, cerebrospinal fluid (CSF), a tissue extract, or a biopsy sample. In some embodiments, the reference sample is obtained from a control subject, wherein the control subject does not have the disease. In some embodiments, the reference sample is obtained from the subject before the subject is treated for the disease. In some embodiments, the reference sample is from a subject that has been successfully treated for the disease.

[0133] Various embodiments of the present invention provide a method of treating a subject for a disease, the method comprising: (a) making an assessment of the subject based on a biomarker signature for the subject, wherein the assessment is a diagnosis of the disease; and (b) treating the subject based on the assessment, wherein the biomarker signature for the subject is obtained by a method comprising, obtaining a sample from the subject; treating the sample with a protease to obtain a digested sample; and measuring in the digested sample a representation of one or more biomarkers to obtain the biomarker signature for the subject, wherein the measuring is performed using a mass spectrometer and a mass spectrometry technique, and the representation of the one or more biomarkers is obtained using a mass spectrometry assay, wherein the mass spectrometry assay comprises a quantitation of a Q1/Q3 mass value pair according to Table 5, wherein the Q1/Q3 mass value pair is used to quantify a corresponding peptide and protein according to Table 5. In some embodiments, the Q1/Q3 mass value pair is one or more the Q1/Q3 mass value pairs. In some embodiments, the Q1/Q3 mass value pair is two or more the Q1/Q3 mass value pairs.

[0134] Various embodiments of the present invention provide a method of obtaining a biomarker signature for a subject, the method comprising: obtaining a sample from the subject; treating the sample with a protease to obtain a digested sample; and measuring in the digested sample a representation of one or more biomarkers to obtain the biomarker signature for the subject, wherein the measuring is performed using a mass spectrometer and a mass spectrometry technique, and the representation of the one or more biomarkers is obtained using a mass spectrometry assay, wherein the mass spectrometry assay comprises a quantitation of a Q1 mass value according to Table 5, wherein the Q1 mass value is used to quantify a corresponding peptide and protein according to Table 5. In some embodiments, the Q1 mass value is one or more Q1 mass values. In some embodiments, the Q1 mass value is two or more Q1 mass values. In some embodiments, the protease is trypsin, chymotrypsin, endoproteinase Lys-C, endoproteinase Asp-N, pepsin, thermolysin, papain, proteinase K, subtilisin, clostripain, exopeptidase, carboxypeptidase, cathepsin C, cyanogen bromide, formic acid, hydroxylamine, or NTCB, or a combination thereof. In some embodiments, the protease is trypsin. In some the mass spectrometer is a quadrupole time-of-flight (QTOF) mass spectrometer or a hybrid quadrupole-orbitrap (QOrbitrap) mass spectrometer. In some embodiments, each Q1 mass value is correlated to the one or more peptides according to Table 5. In some embodiments, the one or more peptides are correlated to one or more proteins according to Table 5. In some embodiments, the one or more biomarkers are the one or more proteins according to Table 5. In some embodiments, the mass spectrometry technique is parallel reaction monitoring (PRM). In some embodiments, the mass spectrometry technique is liquid chromatography-parallel reaction monitoring-mass spectrometry (LC-PRM-MS). In some embodiments, the method further comprises adding a stable-isotope labeled peptide standard to the sample. In some embodiments, the method further comprises comparing the biomarker signature from the subject to a biomarker signature from a reference sample. In some embodiments, the method further comprises making an assessment of the subject based on the comparison, wherein the assessment is a diagnosis of a disease. In some embodiments, the sample is plasma, serum, cerebrospinal fluid (CSF), a tissue extract, or a biopsy sample. In some embodiments, the reference sample is obtained from a control subject, wherein the control subject does not have the disease. In some embodiments, the reference sample is obtained from the subject before the subject is treated for the disease. In some embodiments, the reference sample is from a subject that has been successfully treated for the disease.

[0135] Various embodiments of the present invention provide a method of treating a subject for a disease, the method comprising: (a) making an assessment of the subject based on a biomarker signature for the subject, wherein the assessment is a diagnosis of the disease; and (b) treating the subject based on the assessment, wherein the biomarker signature for the subject is obtained by a method comprising: obtaining a sample from the subject; treating the sample with a protease to obtain a digested sample; and measuring in the digested sample a representation of one or more biomarkers to obtain the biomarker signature for the subject, wherein the measuring is performed using a mass spectrometer and a mass spectrometry technique, and the representation of the one or more biomarkers is obtained using a mass spectrometry assay, wherein the mass spectrometry assay comprises a quantitation of a Q1 mass value according to Table 5, wherein the Q1 mass value is used to quantify a corresponding peptide and protein according to Table 5. In some embodiments, the Q1 mass value is one or more Q1 mass values. In some embodiments, the Q1 mass value is two or more Q1 mass values.

[0136] Various embodiments of the present invention provide a method for assessing the efficacy of a treatment, comprising: comparing a biomarker signature from a subject to a biomarker signature from a reference sample, wherein a change in the biomarker signature from the subject relative to the biomarker signature from the reference sample is indicative of the efficacy of the treatment, wherein the treatment is according to a method of treating a subject for a disease, the method comprising: (a) making an assessment of the subject based on the biomarker signature, wherein the assessment is a diagnosis of the disease; and (b) treating the subject based on the assessment, wherein the biomarker signature for the subject is obtained by a method comprising, obtaining a sample from the subject; treating the sample with a protease to obtain a digested sample; and measuring in the digested sample a representation of one or more biomarkers to obtain the biomarker signature for the subject, wherein the measuring is performed using a mass spectrometer and a mass spectrometry technique, and the representation of the one or more biomarkers is obtained using a mass spectrometry assay, wherein the mass spectrometry assay comprises a quantitation of a Q1/Q3 mass value pair according to Table 5, wherein the Q1/Q3 mass value pair is used to quantify a corresponding peptide and protein according to Table 5. In some embodiments, the Q1/Q3 mass value pair is one or more the Q1/Q3 mass value pairs. In some embodiments, the Q1/Q3 mass value pair is two or more the Q1/Q3 mass value pairs. In some embodiments, the reference sample is obtained from a control subject, wherein the control subject does not have the disease. In some embodiments, the reference sample is obtained from the subject before the subject is treated for the disease. In some embodiments, the reference sample is from a subject that has been successfully treated for the disease.

[0137] Various embodiments of the present invention provide a method for assessing the efficacy of a treatment, comprising: comparing a biomarker signature from a subject to a biomarker signature from a reference sample, wherein a change in the biomarker signature from the subject relative to the biomarker signature from the reference sample is indicative of the efficacy of the treatment, wherein the treatment is according to a method of treating a subject for a disease, the method comprising: (a) making an assessment of the subject based on the biomarker signature, wherein the assessment is a diagnosis of the disease; and (b) treating the subject based on the assessment, wherein the biomarker signature for the subject is obtained by a method comprising: obtaining a sample from the subject; treating the sample with a protease to obtain a digested sample; and measuring in the digested sample a representation of one or more biomarkers to obtain the biomarker signature for the subject, wherein the measuring is performed using a mass spectrometer and a mass spectrometry technique, and the representation of the one or more biomarkers is obtained using a mass spectrometry assay, wherein the mass spectrometry assay comprises a quantitation of a Q1 mass value according to Table 5, wherein the Q1 mass value is used to quantify a corresponding peptide and protein according to Table 5. In some embodiments, the Q1 mass value is one or more Q1 mass values. In some embodiments, the Q1 mass value is two or more Q1 mass values. In some embodiments, the reference sample is obtained from a control subject, wherein the control subject does not have the disease. In some embodiments, the reference sample is obtained from the subject before the subject is treated for the disease. In some embodiments, the reference sample is from a subject that has been successfully treated for the disease.

[0138] Functions

[0139] As used herein, the term “function” is in reference to an organism, organ, a biological process, a biological system, a cellular process, a cellular system, a molecular process, a molecular system and the like, non-limiting examples of which include lipid metabolism, redox signaling, immune response, hematological system development, hematological system function, reproductive system development, reproductive system function, and gene expression. In some embodiments, the function is a physiological process.

[0140] As used herein, the term “function” is in reference to an organism, organ, a biological process, a biological system, a cellular process, a cellular system, a molecular process, a molecular system and the like, non-limiting examples of which include cellular movement, cellular growth, cell proliferation, tissue morphology, organismal survival, molecular transport, immune cell trafficking, cell-to-cell signaling, cell-to-cell interaction, lipid metabolism, small molecule biochemistry, tissue development, protein synthesis, free radical scavenging, protein degradation, protein synthesis, hematological system development, hematological system function, tissue morphology, carbohydrate metabolism, cellular function and maintenance, cell signaling, vitamin metabolism, mineral metabolism, digestive system development, digestive system function, hepatic system development, hepatic system function, hair development, hair function, skin development, skin function, nervous system development, nervous system function, cellular compromise, nucleic acid metabolism, small molecule biochemistry, organ morphology, organismal development, renal system development, renal system function, urological system development, urological system function, humoral immune response, amino acid metabolism, energy production, post-translational modification. In some embodiments, the function is a physiological process.

[0141] As used herein, the term “function” is in reference to an organism, organ, a biological process, a biological system, a cellular process, a cellular system, a molecular process, a molecular system and the like, non-limiting examples of which include Acute Phase Response Signaling, LXR/RXR Activation, FXR/RXR Activation, Coagulation System, Complement System, Clathrin-mediated Endocytosis Signaling, Atherosclerosis Signaling, IL-12 Signaling and Production in Macrophages, Production of Nitric Oxide and Reactive Oxygen Species in Macrophages, Intrinsic Prothrombin Activation Pathway, Extrinsic Prothrombin Activation Pathway, Neuroprotective Role of THOP1 in Alzheimer's Disease, Hematopoiesis from Pluripotent Stem Cells, Primary Immunodeficiency Signaling, Systemic Lupus Erythematosus Signaling, Role of Pattern, Recognition Receptors in Recognition of Bacteria and Viruses, TR/RXR Activation, Role of Tissue Factor in Cancer, MSP-RON Signaling Pathway, Glioma Invasiveness Signaling, Caveolar-mediated Endocytosis Signaling, Communication between Innate and Adaptive Immune Cells and phagosome formation. In some embodiments, the function is a physiological process.

[0142] As used herein, the term “function” is in reference to an organism, organ, a biological process, a biological system, a cellular process, a cellular system, a molecular process, a molecular system and the like, non-limiting examples of which include cell movement, proliferation of cells, migration of cells, quantity of cells, organismal death, development of vasculature, transport of molecule, leukocyte migration, inflammatory response, activation of cells, morphology of body cavity, adhesion of blood cells, concentration of lipid, generation of cells, movement of myeloid cells, cell movement of phagocytes, fatty acid metabolism, synthesis of lipid, angiogenesis, quantity of blood cells, cellular homeostasis, aggregation of cells, metabolism of protein, aggregation of blood cells, adhesion of immune cells, binding of cells, metabolism of reactive oxygen species, activation of blood cells, vasculogenesis, abnormal morphology of body cavity, synthesis of reactive oxygen species, cell movement of neutrophils, quantity of metal, catabolism of protein, neurological signs, activation of leukocytes, coagulation, aggregation of blood platelets, quantity of leukocytes, coagulation of blood, Bleeding, quantity of steroid, immune response of cells, survival of organism, transport of lipid, synthesis of fatty acid, size of lesion, engulfment of cells, cellular infiltration, chemotaxis, binding of blood cells, activation of myeloid cells, activation of phagocytes, quantity of carbohydrate, ion homeostasis of cells, growth of epithelial tissue, transport of steroid, export of molecule, concentration of sterol, cellular infiltration by leukocytes, quantity of Ca2+, quantity of phagocytes, quantity of myeloid cells, secretion of molecule, morphology of connective tissue, cytolysis, flux of Ca2+, immune response of leukocytes, accumulation of cells, recruitment of cells, endothelial cell development, adhesion of myeloid cells, generation of reactive oxygen species, migration of phagocytes, concentration of fatty acid, proliferation of endothelial cells, activation of antigen presenting cells, concentration of triacylglycerol, recruitment of leukocytes, production of reactive oxygen species, quantity of protein in blood, Organ Degeneration, efflux of cholesterol, adhesion of phagocytes, synthesis of eicosanoid, response of myeloid cells, phagocytosis of cells, concentration of cholesterol, metabolism of membrane lipid derivative, morphology of blood cells, binding of phagocytes, permeability of vasculature, synthesis of prostaglandin, homeostasis of lipid, release of lipid, immune response of phagocytes, activation of macrophages, steroid metabolism, recruitment of phagocytes, accumulation of leukocytes, proteolysis, cell movement of macrophages, recruitment of myeloid cells, endocytosis by eukaryotic cells, quantity of granulocytes, complement activation, transport of phospholipid, size of atherosclerotic lesion, binding of endothelial cells, binding of professional phagocytic cells, cell movement of monocytes, hydrolysis of lipid, quantity of reactive oxygen species, secretion of lipid, influx of Ca2+, Shock Response, quantity of neutrophils, synthesis of nitric oxide, mass of organism, function of cardiovascular system, efflux of phospholipid, esterification of cholesterol, adhesion of blood platelets, quantity of protein lipid complex in blood, experimentally, induced diabetes, permeability of blood vessel, adhesion of granulocytes, metabolism of hydrogen, peroxide, binding of myeloid cells, metabolism of acylglycerol, uptake of lipid, engulfment of leukocytes, accumulation of myeloid cells, immune response of antigen presenting cells, recruitment of granulocytes, internalization of cells, metabolism of phospholipid, molecular cleavage of protein fragment, synthesis of steroid, area of atherosclerotic lesion, abortion, binding of blood platelets, quantity of hdl cholesterol in blood, adhesion of neutrophils, chemotaxis of monocytes, biosynthesis of hydrogen peroxide, metabolism of triacylglycerol, activation of blood platelets, metabolism of cholesterol, cell movement of epithelial cell lines, activation of neuroglia, accumulation of phagocytes, migration of granulocytes, phagocytosis of phagocytes, phagocytosis of myeloid cells, conversion of lipid, migration of muscle cells, metabolism of phosphatidic acid, migration of antigen presenting cells, healing of wound, size of infarct, proliferation of liver cells, recruitment of neutrophils, quantity of macrophages, habitual abortion, secretion of triacylglycerol, quantity of superoxide, binding of vascular endothelial cells, peroxidation of lipid, activation of endothelial cells, quantity of blood vessel, injury of cells, binding of lipid, binding of carbohydrate, injury of kidney, homeostasis of cholesterol, response of granulocytes, cell movement of embryonic cell lines, activation of granulocytes, adhesion of epithelial cells, immune response of T lymphocytes, phagocytosis of antigen presenting cells, quantity of muscle, synthesis of prostaglandin E2, formation of blood vessel, release of eicosanoid, transport of heavy metal, cell movement of leukemia cell lines, cell movement of kidney cell lines, receptor-mediated endocytosis, migration of smooth muscle cells, transmission of lipid, concentration of cholesterol ester, respiratory burst of granulocytes, adhesion of kidney cell lines, neovascularization of choroid, quantity of ldl, cholesterol in blood, relaxation of artery, recruitment of monocytes, function of blood platelets, synthesis of cyclic GMP, flow of blood, binding of polysaccharide, synthesis of cholesterol, binding of, antigen presenting cells, generation of superoxide, production of hydrogen peroxide, accumulation of macrophages, immune response of neutrophils, formation of reactive oxygen species, release of arachidonic acid, growth of bacteria, activation of neutrophils, quantity of heavy metal, damage of connective tissue, release of cholesterol, uptake of cholesterol ester, activation of carbohydrate, coagulation of plasma, quantity of lysophosphatidylcholine, metabolism of lipoprotein, internalization of lipid, movement of macrophage cancer cell lines, binding of cell surface, hydrolysis of triacylglycerol, respiratory burst of neutrophils, adhesion of embryonic cell lines, migration of eosinophils, quantity of endothelial cells, metabolism of phosphatidylcholine, binding of neutrophils, clearance of lipid, adhesion of epithelial cell lines, quantity of smooth muscle cells, adhesion of monocytes, recruitment of phospholipid, stimulation of endothelial tissue, surface area of atherosclerotic lesion, activation of inflammatory leukocytes, concentration of lipopolysaccharide, import of cholesterol, opsonization of cells, relaxation of coronary artery, synthesis of 12(S)-hydroxyeicosatetraenoic acid, lysis of blood clot, agglutination of blood cells, synthesis of 6-keto-prostaglandin F1 alpha, formation of plaque, release of phosphatidic acid, classical complement pathway, clearance of triacylglycerol, synthesis of corticosterone, activated partial thromboplastin time of plasma, auto-oxidation of amino acids, complement component C1s deficiency, delay in renal and urological disorder, density of artery, recruitment of phosphatidic acid. In some embodiments, the function is a physiological process.

[0143] As used herein, the term “function” is in reference to an organism, organ, a biological process, a biological system, a cellular process, a cellular system, a molecular process, a molecular system and the like, non-limiting examples of which include inflammatory response, lipid metabolism, redox signaling, immune response, endothelial dysfunction or any combination thereof. In some embodiments, the function is a physiological process.

[0144] In some embodiments, the function is inflammatory response and the proteins are any one or more of Alpha-2-macroglobulin (UniProt Accession No. P01023) (SEQ ID NO: 15), Angiotensinogen (UniProt Accession No. P01019) (SEQ ID NO: 14), Alpha-2-HS-glycoprotein (UniProt Accession No. P02765) (SEQ ID NO: 35), Apolipoprotein A-I (UniProt Accession No. P02647) (SEQ ID NO: 21), Apolipoprotein E (UniProt Accession No. P02649) (SEQ ID NO: 22), Complement C3 (UniProt Accession No. P01024) (SEQ ID NO: 16), Complement C5 (UniProt Accession No. P01031) (SEQ ID NO: 17), Complement factor H (UniProt Accession No. P08603) (SEQ ID NO: 56), C-reactive protein (UniProt Accession No. P02741) (SEQ ID NO: 28), Coagulation factor XII (UniProt Accession No. P00748) (SEQ ID NO: 9), Prothrombin (UniProt Accession No. P00734) (SEQ ID NO: 4), Vitamin D-binding protein (UniProt Accession No. P02774) (SEQ ID NO: 37), Gelsolin (UniProt Accession No. P06396) (SEQ ID NO: 51), Haptoglobin (UniProt Accession No. P00738) (SEQ ID NO: 6), Ig mu chain C region (UniProt Accession No. P01871) (SEQ ID NO: 19), Plasma kallikrein (UniProt Accession No. P03952) (SEQ ID NO: 40), Apolipoprotein(a) (UniProt Accession No. P08519) (SEQ ID NO: 55), Lumican (UniProt Accession No. P51884) (SEQ ID NO: 69), Alpha-1-acid glycoprotein 1 (UniProt Accession No. P02763) (SEQ ID NO: 34), Plasminogen (UniProt Accession No. P00747) (SEQ ID NO: 8), Serum paraoxonase/arylesterase 1 (UniProt Accession No. P27169) (SEQ ID NO: 65), Alpha-1-antitrypsin (UniProt Accession No. P01009) (SEQ ID NO: 12), Alpha-1-antichymotrypsin (UniProt Accession No. P01011) (SEQ ID NO: 13), Plasma protease C1 inhibitor (UniProt Accession No. P05155) (SEQ ID NO: 48), Vitronectin (UniProt Accession No. P04004) (SEQ ID NO: 42) or combinations thereof.

[0145] In some embodiments, the function is lipid metabolism and the proteins are any one or more of Angiotensinogen (UniProt Accession No. P01019) (SEQ ID NO: 14), Alpha-2-HS-glycoprotein (UnitProt Accession No. P02765) (SEQ ID NO: 35), Serum albumin (UniProt Accession No. P02768) (SEQ ID NO: 36), Apolipoprotein A-I (UniProt Accession No. P02647) (SEQ ID NO: 21), Apolipoprotein A-II (UniProt Accession No. P02652) (SEQ ID NO: 23), Apolipoprotein A-IV (UniProt Accession No. P06727) (SEQ ID NO: 52), Apolipoprotein B-100 (UniProt Accession No. P04114) (SEQ ID NO: 43), Apolipoprotein C-I (UniProt Accession No. P02654) (SEQ ID NO: 24), Apolipoprotein (UniProt Accession No. P02656) (SEQ ID NO: 26), Apolipoprotein E (UniProt Accession No. P02649) (SEQ ID NO: 22), Complement C3 (UniProt Accession No. P01024) (SEQ ID NO: 16), Complement C5 (UniProt Accession No. P01031) (SEQ ID NO: 17), Complement factor B (UniProt Accession No. P00751) (SEQ ID NO: 10), Complement factor H (UniProt Accession No. P08603) (SEQ ID NO: 56), Clusterin (UniProt Accession No. P10909) (SEQ ID NO: 61), C-reactive protein (UniProt Accession No. P02741) (SEQ ID NO: 28), Prothrombin (UniProt Accession No. P00734) (SEQ ID NO: 4), Vitamin D-binding protein (UniProt Accession No. P02774) (SEQ ID NO: 37), Haptoglobin (UniProt Accession No. P00738) (SEQ ID NO. 6), Plasma kallikrein (UniProt Accession No. P03952) (SEQ ID NO: 40), Apolipoprotein(a) (UniProt Accession No. P08519) (SEQ ID NO: 55), Plasminogen (UniProt Accession No. P00747) (SEQ ID NO: 8), Serum paraoxonase/arylesterase 1 (UniProt Accession No. P27169) (SEQ ID NO: 65), Serum paraoxonase/lactonase 3 (UniProt Accession No. Q15166) (SEQ ID NO: 72), sex hormone binding globulin (UniProt Accession No. P04278) (SEQ ID NO: 46) or combinations thereof.

[0146] In some embodiments, the function is redox signaling and the proteins are any one or more of Angiotensinogen (UniProt Accession No. P01019) (SEQ ID NO: 14), Serum albumin (UniProt Accession No. P02768) (SEQ ID NO: 36), Apolipoprotein A-I (UniProt Accession No. P02647) (SEQ ID NO: 21), Apolipoprotein A-IV (UniProt Accession No. P06727) (SEQ ID NO: 52), Apolipoprotein (UniProt Accession No. P02655) (SEQ ID NO: 25), Apolipoprotein E (UniProt Accession No. P02649) (SEQ ID NO: 22), Complement C3 (UniProt Accession No. P01024) (SEQ ID NO: 16), Complement C5 (UniProt Accession No. P01031) (SEQ ID NO: 17), Complement factor B (UniProt Accession No. P00751) (SEQ ID NO: 10), Complement factor H (UniProt Accession No. P08603) (SEQ ID NO: 56), C-reactive protein (UniProt Accession No. P02741) (SEQ ID NO: 28), Prothrombin (UniProt Accession No. P00734) (SEQ ID NO: 4), Gelsolin (UniProt Accession No. P06396) (SEQ ID NO: 51), Hemoglobin subunit alpha (UniProt Accession No. P69905) (SEQ ID NO: 70), Haptoglobin (UniProt Accession No. P00738) (SEQ ID NO: 6), Inter-alpha-trypsin inhibitor heavy chain H4 (UniProt Accession No. Q14624) (SEQ ID NO: 71), Serum paraoxonase/lactonase 3 (UniProt Accession No. Q15166) (SEQ ID NO: 72), Peroxiredoxin-2 (UniProt Accession No. P32119) (SEQ ID NO: 66), Alpha-1-antitrypsin (UniProt Accession No. P01009) (SEQ ID NO: 12), Alpha-1-antichymotrypsin (UniProt Accession No. P01011) (SEQ ID NO: 13), Serotransferrin (UniProt Accession No. P02787) (SEQ ID NO: 38), or combinations thereof.

[0147] In some embodiments, the function is immune response and the proteins are any one or more of Complement C1q subcomponent subunit B (UniProt Accession No. P02746) (SEQ ID NO: 29), Complement C1q subcomponent subunit C (UniProt Accession No. P02747) (SEQ ID NO: 30), Complement C1r subcomponent (UniProt Accession No. P00736) (SEQ ID NO: 50), Complement C1s subcomponent (UniProt Accession No. P09871) (SEQ ID NO: 58), Complement C3 (UniProt Accession No. P01024) (SEQ ID NO: 16), Complement C4-A (UniProt Accession No. P0C0L4) (SEQ ID NO: 59), Complement C5 (UniProt Accession No. P01031) (SEQ ID NO: 17), Complement component C8 alpha chain (UniProt Accession No. P07357) (SEQ ID NO: 53), Complement component C9 (UniProt Accession No. P02748) (SEQ ID NO: 31), Complement factor B (UniProt Accession No. P00751) (SEQ ID NO: 10), Plasma protease C1 inhibitor (UniProt Accession No. P05155) (SEQ ID NO: 48), or combinations thereof.

[0148] In some embodiments, the function is endothelial dysfunction and the proteins are any one or more of Angiotensinogen (UniProt Accession No. P01019) (SEQ ID NO: 14), C-reactive protein (UniProt Accession No. P02741) (SEQ ID NO: 28), Lumican (UniProt Accession No. P51884) (SEQ ID NO: 69), Plasminogen (UniProt Accession No. P00747) (SEQ ID NO: 8), Peroxiredoxin-2 (UniProt Accession No. P32119) (SEQ ID NO: 66), Alpha-1-antitrypsin (UniProt Accession No. P01009) (SEQ ID NO: 12), Alpha-1-antichymotrypsin (UniProt Accession No. P01011) (SEQ ID NO: 13), Antithrombin-III (UniProt Accession No. P01008) (SEQ ID NO: 11), or combinations thereof.

[0149] In some embodiments, the function is coagulation and the proteins are any one or more of Serum albumin (UniProt Accession No. P02768) (SEQ ID NO: 36), Apolipoprotein E (UniProt Accession No. P02649) (SEQ ID NO: 22), Complement C3 (UniProt Accession No. P01024) (SEQ ID NO: 16), Complement C4-A (UniProt Accession No. P0C0L4) (SEQ ID NO: 59), Complement C4-B (UniProt Accession No. P0C0L5) (SEQ ID NO: 60), Complement C5 (UniProt Accession No. P01031) (SEQ ID NO: 17), Complement component C9 (UniProt Accession No. P02748) (SEQ ID NO: 31), Complement factor B (UniProt Accession No. P00751) (SEQ ID NO: 10), Complement factor H (UniProt Accession No.) (SEQ ID NO: 56), C-reactive protein (UniProt Accession No. P02741) (SEQ ID NO: 28), Coagulation factor X (UniProt Accession No. P00742) (SEQ ID NO: 7), Coagulation factor XII (UniProt Accession No. P00748) (SEQ ID NO: 9), Prothrombin (UniProt Accession No. P00734) (SEQ ID NO: 4), Fibrinogen (UniProt Accession No. P02671) (SEQ ID NO: 27), Haptoglobin (UniProt Accession No. P00738) (SEQ ID NO: 6), Integrin alpha-Iib (UniProt Accession No. P08514) (SEQ ID NO: 54), Plasma kallikrein (UniProt Accession No. P03952) (SEQ ID NO: 40), Apolipoprotein(a) (UniProt Accession No. P08519) (SEQ ID NO: 55), Plasminogen (UniProt Accession No. P00747) (SEQ ID NO: 8), Serum paraoxonase/arylesterase 1 (UniProt Accession No. P27169) (SEQ ID NO: 65), Peroxiredoxin-2 (UniProt Accession No. P32119) (SEQ ID NO: 66), Plasma serine protease inhibitor (UniProt Accession No. P05154) (SEQ ID NO: 47), Antithrombin-III (UniProt Accession No. P01008) (SEQ ID NO: 11), Heparin cofactor 2 (UniProt Accession No. P05546) (SEQ ID NO: 50), Alpha-2-antiplasmin (UniProt Accession No. P08697) (SEQ ID NO: 57), Vitronectin (UniProt Accession No. P04004) (SEQ ID NO: 42), von Willebrand factor (UniProt Accession No. P04275) (SEQ ID NO: 45), or combinations thereof.

[0150] In some embodiments, the function is lipid metabolism and the proteins are any one or more of Angiotensinogen (UniProt Accession No. P01019) (SEQ ID NO: 14), Alpha-2-HS-glycoprotein (UnitProt Accession No. P02765) (SEQ ID NO: 35), Serum albumin (UniProt Accession No. P02768) (SEQ ID NO: 36), Apolipoprotein A-I (UniProt Accession No. P02647) (SEQ ID NO: 21), Apolipoprotein A-II (UniProt Accession No. P02652) (SEQ ID NO: 23), Apolipoprotein A-IV (UniProt Accession No. P06727) (SEQ ID NO: 52), Apolipoprotein B-100 (UniProt Accession No. P04114) (SEQ ID NO: 43), Apolipoprotein C-I (UniProt Accession No. P02654) (SEQ ID NO: 24), Apolipoprotein (UniProt Accession No. P02656) (SEQ ID NO: 26), Apolipoprotein E (UniProt Accession No. P02649) (SEQ ID NO: 22), Zinc-alpha-2-glycoprotein (UniProt Accession No. P25311) (SEQ ID NO: 64), Complement C3 (UniProt Accession No. P01024) (SEQ ID NO: 16), Complement C5 (UniProt Accession No. P01031) (SEQ ID NO: 17), Complement factor B (UniProt Accession No. P00751) (SEQ ID NO: 10), Complement factor H (UniProt Accession No. P08603) (SEQ ID NO: 56), Clusterin (UniProt Accession No. P10909) (SEQ ID NO: 61), C-reactive protein (UniProt Accession No. P02741) (SEQ ID NO: 28), Prothrombin (UniProt Accession No. P00734) (SEQ ID NO: 4), Vitamin D-binding protein (UniProt Accession No. P02774) (SEQ ID NO: 37), Haptoglobin (UniProt Accession No. P00738) (SEQ ID NO. 6), Plasma kallikrein (UniProt Accession No. P03952) (SEQ ID NO: 40), Apolipoprotein(a) (UniProt Accession No. P08519) (SEQ ID NO: 55), Plasminogen (UniProt Accession No. P00747) (SEQ ID NO: 8), Serum paraoxonase/arylesterase 1 (UniProt Accession No. P27169) (SEQ ID NO: 65), Serum paraoxonase/lactonase 3 (UniProt Accession No. Q15166) (SEQ ID NO: 72), Alpha-1-antitrypsin (UniProt Accession No. P01009) (SEQ ID NO: 12), sex hormone binding globulin (UniProt Accession No. P04278) (SEQ ID NO: 46) or combinations thereof.

[0151] In some embodiments, the function is inflammatory response and the proteins are any one or more of Alpha-2-macroglobulin (UniProt Accession No. P01023) (SEQ ID NO: 15), Angiotensinogen (UniProt Accession No. P01019) (SEQ ID NO: 14), Alpha-2-HS-glycoprotein (UniProt Accession No. P02765) (SEQ ID NO: 35), Apolipoprotein A-I (UniProt Accession No. P02647) (SEQ ID NO: 21), Apolipoprotein E (UniProt Accession No. P02649) (SEQ ID NO: 22), Complement C3 (UniProt Accession No. P01024) (SEQ ID NO: 16), Complement C5 (UniProt Accession No. P01031) (SEQ ID NO: 17), Complement factor H (UniProt Accession No. P08603) (SEQ ID NO: 56), C-reactive protein (UniProt Accession No. P02741) (SEQ ID NO: 28), C-reactive protein (UniProt Accession No. P02741) (SEQ ID NO: 28), Coagulation factor XII (UniProt Accession No. P00748) (SEQ ID NO: 9), Prothrombin (UniProt Accession No. P00734) (SEQ ID NO: 4), Vitamin D-binding protein (UniProt Accession No. P02774) (SEQ ID NO: 37), Gelsolin (UniProt Accession No. P06396) (SEQ ID NO: 51), Haptoglobin (UniProt Accession No. P00738) (SEQ ID NO: 6), Ig mu chain C region (UniProt Accession No. P01871) (SEQ ID NO: 19), Plasma kallikrein (UniProt Accession No. P03952) (SEQ ID NO: 40), Apolipoprotein(a) (UniProt Accession No. P08519) (SEQ ID NO: 55), Lumican (UniProt Accession No. P51884) (SEQ ID NO: 69), Alpha-1-acid glycoprotein 1 (UniProt Accession No. P02763) (SEQ ID NO: 34), Plasminogen (UniProt Accession No. P00747) (SEQ ID NO: 8), Serum paraoxonase/arylesterase 1 (UniProt Accession No. P27169) (SEQ ID NO: 65), Alpha-1-antitrypsin (UniProt Accession No. P01009) (SEQ ID NO: 12), Alpha-1-antichymotrypsin (UniProt Accession No. P01011) (SEQ ID NO: 13), Plasma protease C1 inhibitor (UniProt Accession No. P05155) (SEQ ID NO: 48), Vitronectin (UniProt Accession No. P04004) (SEQ ID NO: 42) or combinations thereof.

[0152] In some embodiments, the function is immune response and the proteins are any one or more of Angiotensinogen (UniProt Accession No. P01019) (SEQ ID NO: 14), Alpha-2-HS-glycoprotein (UniProt Accession No. P02765) (SEQ ID NO: 35), Apolipoprotein A-I (UniProt Accession No. P02647) (SEQ ID NO: 21), Apolipoprotein A-II (UniProt Accession No. P02652) (SEQ ID NO: 23), Apolipoprotein E (UniProt Accession No. P02649) (SEQ ID NO: 22), Complement C1q subcomponent subunit B (UniProt Accession No. P02746) (SEQ ID NO: 29), Complement C1q subcomponent subunit C (UniProt Accession No. P02747) (SEQ ID NO: 30), Complement C1r subcomponent (UniProt Accession No. P00736) (SEQ ID NO: 50), Complement C1s subcomponent (UniProt Accession No. P09871) (SEQ ID NO: 58), Complement C3 (UniProt Accession No. P01024) (SEQ ID NO: 16), Complement C4-A (UniProt Accession No. P0C0L4) (SEQ ID NO: 59), Complement C4-B (UniProt Accession No. P0C0L5) (SEQ ID NO: 60), Complement C5 (UniProt Accession No. P01031) (SEQ ID NO: 17), Complement component C8 alpha chain (UniProt Accession No. P07357) (SEQ ID NO: 53), Complement component C9 (UniProt Accession No. P02748) (SEQ ID NO: 31), Complement factor B (UniProt Accession No. P00751) (SEQ ID NO: 10), Complement factor H (UniProt Accession No. P08603) (SEQ ID NO: 56), C-reactive protein (UniProt Accession No. P02741) (SEQ ID NO: 28), Coagulation factor X (UniProt Accession No. P00742) (SEQ ID NO: 7), Gelsolin (UniProt Accession No. P06396) (SEQ ID NO: 51), Ig alpha-1 chain C region (UniProt Accession No. P01876) (SEQ ID NO: 20), Ig gamma-3 chain C region (UniProt Accession No. P01860) (SEQ ID NO: 18), Ig mu chain C region (UniProt Accession No. P01871) (SEQ ID NO: 19), Lumican (UniProt Accession No. P51884) (SEQ ID NO: 69), Serum paraoxonase/arylesterase 1 (UniProt Accession No. P27169) (SEQ ID NO: 65), Plasma protease C1 inhibitor (UniProt Accession No. P05155) (SEQ ID NO: 48), Vitronectin (UniProt Accession No. P04004) (SEQ ID NO:), von Willebrand factor (UniProt Accession No. P04275) (SEQ ID NO: 45), or combinations thereof

[0153] Diseases

[0154] Non-limiting examples of diseases include atherosclerosis, cardiac disease, lung damage, renal failure, endothelial dysfunction, cardiovascular disease, neurological disease, psychological disorders, developmental disorder, hereditary disorder, immunological disease, connective tissue disorders, skeletal disorders, muscular disorders. In some embodiments, the disease is a pathological process.

[0155] Non-limiting examples of diseases include disorders associated with function or development and/or disorders of a function or development, wherein the function or development is lipid metabolism, redox signaling, immune response, hematological system development, hematological system function, reproductive system development, reproductive system function, and gene expression. In some embodiments, the disease is a pathological process.

[0156] Other non-limiting examples of diseases include cancer, gastrointestinal disease, hepatic system disease, reproductive system disease, dermatological diseases, cell death, metabolic disease, neurological disease, immunological disease, hematological disease, psychological disorders, endocrine system disorders, connective tissue disorders, infectious diseases, hereditary disorder, respiratory disease, renal disease, urological disease, nutritional disease, and ophthalmic disease. In some embodiments, the disease is a pathological process.

[0157] Other non-limiting examples of diseases include disorders associated with function or development and/or disorders of a function or development, wherein the function or development is cellular movement, cellular growth, cell proliferation, tissue morphology, organismal survival, molecular transport, immune cell trafficking, cell-to-cell signaling, cell-to-cell interaction, lipid metabolism, small molecule biochemistry, tissue development, protein synthesis, free radical scavenging, protein degradation, protein synthesis, hematological system development, hematological system function, tissue morphology, carbohydrate metabolism, cellular function and maintenance, cell signaling, vitamin metabolism, mineral metabolism, digestive system development, digestive system function, hepatic system development, hepatic system function, hair development, hair function, skin development, skin function, nervous system development, nervous system function, cellular compromise, nucleic acid metabolism, small molecule biochemistry, organ morphology, organismal development, renal system development, renal system function, urological system development, urological system function, humoral immune response, amino acid metabolism, energy production, post-translational modification. In some embodiments, the disease is a pathological process.

[0158] Other non-limiting examples of diseases include Cardiovascular Disease, Hematological Disease, Hematological System Development and Function Disease, Neurological Disease, Organismal Injury and Abnormalities, Psychological Disorders, Developmental Disorder, Hereditary Disorder, Immunological Disease, Organismal Injury and Abnormalities, Cell-To-Cell Signaling and Interaction Disorder, Reproductive System Development and Function Disorder, Gene Expression Disorder, Cardiac Inflammation, Cardiovascular Disease, Connective Tissue Development and Function Disorder, Connective Tissue Disorders, Organismal Injury and Abnormalities, Hereditary Disorder, Skeletal and Muscular Disorders. In some embodiments, the disease is a pathological process.

[0159] Other non-limiting examples of diseases include abdominal cancer, urogenital cancer, abdominal adenocarcinoma, liver lesion, tumorigenesis of genital organ, genital tumor, pelvic cancer, female genital tract cancer, tumorigenesis of reproductive tract, liver cancer, skin lesion, melanoma, skin tumor, malignant cutaneous melanoma cancer, cell death, breast or ovarian cancer, lymphohematopoietic cancer, amyloidosis, glucose metabolism disorder, Lymphoid Cancer and Tumors, hematologic cancer, Dementia, lymphoproliferative malignancy, lymphoid cancer, Alzheimer's disease, diabetes mellitus, inflammation of organ, inflammation of absolute anatomical region, Rheumatic Disease, leukemia, inflammation of body cavity, ovarian cancer, Viral Infection, myeloproliferative disorder, occlusion of artery, chronic inflammatory disorder, atherosclerosis, systemic autoimmune syndrome, acute leukemia, bone marrow cancer, inflammation of joint, neuromuscular disease, acute myeloid leukemia, Thrombosis, Infarction, Movement Disorders, hemostasis, acute coronary syndrome, rheumatoid arthritis, disorder of basal ganglia, autosomal, recessive disease, coronary disease, peripheral vascular disease, Huntington's Disease, abnormal morphology of abdomen, blood clot, immunodeficiency, myocardial infarction, cerebrovascular dysfunction, Bacterial Infections, endocytosis, advanced malignant tumor, damage of lung, hemorrhagic disease, coronary artery disease, Fibrosis, Hypertension, autosomal dominant disease, acute myocardial infarction, injury of lung, systemic inflammatory response syndrome and/or sepsis, infiltration by neutrophils, renal impairment, vascular lesion, anemia, progressive motor neuropathy, disorder of pregnancy, sepsis, atherosclerotic lesion, failure of kidney, chemotaxis of myeloid cells, chemotaxis of phagocytes, inflammation of liver, accumulation of lipid, inflammation of intestine, blood protein disorder, obesity, adenoma, psoriasis, necrosis of epithelial tissue, complement component deficiency, damage of genitourinary system, chronic kidney disease, accumulation of blood cells, insulin resistance, Nephritis, colitis, non-insulin-dependent diabetes mellitus, thrombus, hyperlipoproteinemia, hemolysis, acute lung injury, damage of kidney, dyslipidemia, stroke, lupus erythematosus, cytopenia, Edema, chronic fatigue syndrome, atherogenesis, ischemia of brain, chronic renal failure, thrombocytopenia, diabetic complication, Polycystic Kidney Disease, damage of liver, retinal degeneration, age-related, macular degeneration, dengue fever, formation of blood clot, severe sepsis, Hypercholesterolemia, cholangiocarcinoma, hyperlipidemia, inflammation of pancreas, stenosis, septic shock, cirrhosis of liver, damage of central nervous system, cell death of endothelial cells, Wound, injury of liver, glomerulonephritis, fibrin clot, dengue hemorrhagic fever, thromboembolism, ischemia of heart, thrombosis of vein, infarction of cerebrum, hemolytic anemia, prostatic intraepithelial neoplasia, damage of bone, end stage renal disease, Parasitic Infection, apoptosis of endothelial cells, abnormality of left ventricle, cardiac lesion, venous thromboembolism, fibrinolysis, systemic inflammatory response syndrome, familial amyloidosis, atherosclerosis of aorta, formation of thrombus, bleeding of gastrointestinal tract, Hypertriglyceridemia, hereditary bleeding disorder, autoimmune, glomerulonephritis, cerebral ischemia, infection by Herpesviridae, sexually transmitted disease, metabolic syndrome X, hereditary angioedema, deep vein thrombosis, familial hypercholesterolemia, opsonization, microcytic anemia, unstable angina, bleeding of skin, ischemic stroke, chronic pancreatitis, malaria, albuminuria, angina pectoris, vasculitis, degradation of connective tissue, cerebral malaria, thrombophilia, atypical hemolytic uremic syndrome, familial amyloidotic polyneuropathy, systemic amyloidosis, hypolipoproteinemia, ST-elevation myocardial infarction, focal necrosis of liver, mixed hyperlipidemia, Stevens-Johnson syndrome, pulmonary embolism, agammaglobulinemia, infection by cytomegalovirus, disorder of menstruation, abnormal morphology of mesangial matrix, injury of intestine, activation of vascular endothelial cells, thrombosis of artery, hip fracture, immune response of peritoneal macrophages, acquired immunodeficiency syndrome, autoimmune pancreatitis, damage of blood vessel, purpura, benign thyroid nodule, familial dementia, abdominal aortic aneurysm, recurrent venous thrombosis, hemorrhagic stroke, heparin-induced thrombocytopenia, Finnish type amyloidosis, placental insufficiency, portal vein thrombosis, injury of myocardium, non-ST elevation myocardial infarction, acute immune thrombocytopenic purpura, chronic immune thrombocytopenic purpura, congenital agammaglobulinemia, fetal erythroblastosis, hereditary thrombophilia, recurrent sinopulmonary infection, chronic idiopathic thrombocytopenic purpura, thrombosis of kidney, vascular injury, abnormal aggregation of blood platelets, acute pulmonary embolism, neonatal alloimmune, thrombocytopenia, whooping cough, congenital heart block, familial combined hyperlipidemia, Devic's syndrome, toxic epidermal necrolysis, hematoma, hyperplasia of vascular smooth muscle cells, Rasmussen's encephalitis, hyper-igm immunodeficiency syndrome, chronic inflammatory demyelinating polyradiculoneuropathy, microalbuminuria, acute phase atypical hemolytic uremic syndrome, bleeding of abdominal aorta, recurrent deep vein thrombosis, recurrent thromboembolism, stage 2 acute myocardial infarction, transfusion related acute lung injury. In some embodiments, the disease is a pathological process.

[0160] Other non-limiting examples of diseases include disorders associated with function or development and/or disorders of a function or development, wherein the function or development is Acute Phase Response Signaling, LXR/RXR Activation, FXR/RXR Activation, Coagulation System, Complement System, Clathrin-mediated Endocytosis Signaling, Atherosclerosis Signaling, IL-12 Signaling and Production in Macrophages, Production of Nitric Oxide and Reactive Oxygen Species in Macrophages, Intrinsic Prothrombin Activation Pathway, Extrinsic Prothrombin Activation Pathway, Neuroprotective Role of THOP1 in Alzheimer's Disease, Hematopoiesis from Pluripotent Stem Cells, Primary Immunodeficiency Signaling, Systemic Lupus Erythematosus Signaling, Role of Pattern, Recognition Receptors in Recognition of Bacteria and Viruses, TR/RXR Activation, Role of Tissue Factor in Cancer, MSP-RON Signaling Pathway, Glioma Invasiveness Signaling, Caveolar-mediated Endocytosis Signaling, Communication between Innate and Adaptive Immune Cells and phagosome formation. In some embodiments, the disease is a pathological process.

[0161] Other non-limiting examples of diseases include disorders associated with function or development and/or disorders of a function or development, wherein the function or development is cell movement, proliferation of cells, migration of cells, quantity of cells, organismal death, development of vasculature, transport of molecule, leukocyte migration, inflammatory response, activation of cells, morphology of body cavity, adhesion of blood cells, concentration of lipid, generation of cells, movement of myeloid cells, cell movement of phagocytes, fatty acid metabolism, synthesis of lipid, angiogenesis, quantity of blood cells, cellular homeostasis, aggregation of cells, metabolism of protein, aggregation of blood cells, adhesion of immune cells, binding of cells, metabolism of reactive oxygen species, activation of blood cells, vasculogenesis, abnormal morphology of body cavity, synthesis of reactive oxygen species, cell movement of neutrophils, quantity of metal, catabolism of protein, neurological signs, activation of leukocytes, coagulation, aggregation of blood platelets, quantity of leukocytes, coagulation of blood, Bleeding, quantity of steroid, immune response of cells, survival of organism, transport of lipid, synthesis of fatty acid, size of lesion, engulfment of cells, cellular infiltration, chemotaxis, binding of blood cells, activation of myeloid cells, activation of phagocytes, quantity of carbohydrate, ion homeostasis of cells, growth of epithelial tissue, transport of steroid, export of molecule, concentration of sterol, cellular infiltration by leukocytes, quantity of Ca2+, quantity of phagocytes, quantity of myeloid cells, secretion of molecule, morphology of connective tissue, cytolysis, flux of Ca2+, immune response of leukocytes, accumulation of cells, recruitment of cells, endothelial cell development, adhesion of myeloid cells, generation of reactive oxygen species, migration of phagocytes, concentration of fatty acid, proliferation of endothelial cells, activation of antigen presenting cells, concentration of triacylglycerol, recruitment of leukocytes, production of reactive oxygen species, quantity of protein in blood, Organ Degeneration, efflux of cholesterol, adhesion of phagocytes, synthesis of eicosanoid, response of myeloid cells, phagocytosis of cells, concentration of cholesterol, metabolism of membrane lipid derivative, morphology of blood cells, binding of phagocytes, permeability of vasculature, synthesis of prostaglandin, homeostasis of lipid, release of lipid, immune response of phagocytes, activation of macrophages, steroid metabolism, recruitment of phagocytes, accumulation of leukocytes, proteolysis, cell movement of macrophages, recruitment of myeloid cells, endocytosis by eukaryotic cells, quantity of granulocytes, complement activation, transport of phospholipid, size of atherosclerotic lesion, binding of endothelial cells, binding of professional phagocytic cells, cell movement of monocytes, hydrolysis of lipid, quantity of reactive oxygen species, secretion of lipid, influx of Ca2+, Shock Response, quantity of neutrophils, synthesis of nitric oxide, mass of organism, function of cardiovascular system, efflux of phospholipid, esterification of cholesterol, adhesion of blood platelets, quantity of protein lipid complex in blood, experimentally, induced diabetes, permeability of blood vessel, adhesion of granulocytes, metabolism of hydrogen, peroxide, binding of myeloid cells, metabolism of acylglycerol, uptake of lipid, engulfment of leukocytes, accumulation of myeloid cells, immune response of antigen presenting cells, recruitment of granulocytes, internalization of cells, metabolism of phospholipid, molecular cleavage of protein fragment, synthesis of steroid, area of atherosclerotic lesion, abortion, binding of blood platelets, quantity of hdl cholesterol in blood, adhesion of neutrophils, chemotaxis of monocytes, biosynthesis of hydrogen peroxide, metabolism of triacylglycerol, activation of blood platelets, metabolism of cholesterol, cell movement of epithelial cell lines, activation of neuroglia, accumulation of phagocytes, migration of granulocytes, phagocytosis of phagocytes, phagocytosis of myeloid cells, conversion of lipid, migration of muscle cells, metabolism of phosphatidic acid, migration of antigen presenting cells, healing of wound, size of infarct, proliferation of liver cells, recruitment of neutrophils, quantity of macrophages, habitual abortion, secretion of triacylglycerol, quantity of superoxide, binding of vascular endothelial cells, peroxidation of lipid, activation of endothelial cells, quantity of blood vessel, injury of cells, binding of lipid, binding of carbohydrate, injury of kidney, homeostasis of cholesterol, response of granulocytes, cell movement of embryonic cell lines, activation of granulocytes, adhesion of epithelial cells, immune response of T lymphocytes, phagocytosis of antigen presenting cells, quantity of muscle, synthesis of prostaglandin E2, formation of blood vessel, release of eicosanoid, transport of heavy metal, cell movement of leukemia cell lines, cell movement of kidney cell lines, receptor-mediated endocytosis, migration of smooth muscle cells, transmission of lipid, concentration of cholesterol ester, respiratory burst of granulocytes, adhesion of kidney cell lines, neovascularization of choroid, quantity of ldl, cholesterol in blood, relaxation of artery, recruitment of monocytes, function of blood platelets, synthesis of cyclic GMP, flow of blood, binding of polysaccharide, synthesis of cholesterol, binding of, antigen presenting cells, generation of superoxide, production of hydrogen peroxide, accumulation of macrophages, immune response of neutrophils, formation of reactive oxygen species, release of arachidonic acid, growth of bacteria, activation of neutrophils, quantity of heavy metal, damage of connective tissue, release of cholesterol, uptake of cholesterol ester, activation of carbohydrate, coagulation of plasma, quantity of lysophosphatidylcholine, metabolism of lipoprotein, internalization of lipid, movement of macrophage cancer cell lines, binding of cell surface, hydrolysis of triacylglycerol, respiratory burst of neutrophils, adhesion of embryonic cell lines, migration of eosinophils, quantity of endothelial cells, metabolism of phosphatidylcholine, binding of neutrophils, clearance of lipid, adhesion of epithelial cell lines, quantity of smooth muscle cells, adhesion of monocytes, recruitment of phospholipid, stimulation of endothelial tissue, surface area of atherosclerotic lesion, activation of inflammatory leukocytes, concentration of lipopolysaccharide, import of cholesterol, opsonization of cells, relaxation of coronary artery, synthesis of 12(S)-hydroxyeicosatetraenoic acid, lysis of blood clot, agglutination of blood cells, synthesis of 6-keto-prostaglandin F1 alpha, formation of plaque, release of phosphatidic acid, classical complement pathway, clearance of triacylglycerol, synthesis of corticosterone, activated partial thromboplastin time of plasma, auto-oxidation of amino acids, complement component C1s deficiency, delay in renal and urological disorder, density of artery, recruitment of phosphatidic acid. In some embodiments, the disease is a pathological process.

[0162] In some embodiments, the disease is atherosclerosis, renal failure, cardiovascular disease or any combination thereof.

[0163] In some embodiments, the disease is atherosclerosis and the proteins are any one or more of Angiotensinogen (UniProt Accession No. P01019) (SEQ ID NO: 14), Alpha-2-HS-glycoprotein (UniProt Accession No. P02765) (SEQ ID NO: 35), Apolipoprotein A-I (UniProt Accession No. P02647) (SEQ ID NO: 21), Apolipoprotein A-II (Uniprot Accession No. P02652) (SEQ ID NO: 23), Apolipoprotein A-IV (UniProt Accession No. P06727) (SEQ ID NO: 52), Apolipoprotein B-100 (UniProt Accession No. P04114) (SEQ ID NO: 43), Apolipoprotein C-I (UniProt Accession No. P02654) (SEQ ID NO: 24), Apolipoprotein C-II (UniProt Accession No. P02655) (SEQ ID NO: 25), Apolipoprotein (UniProt Accession No. P02656) (SEQ ID NO. 26), Apolipoprotein E (UniProt Accession No. P02649) (SEQ ID NO: 22), Complement C5 (UniProt Accession No. P01031) (SEQ ID NO: 17), Clusterin (UniProt Accession No. P10909) (SEQ ID NO: 61), C-reactive protein (UniProt Accession No. P02741) (SEQ ID NO: 28), Coagulation factor X (UniProt Accession No. P00742) (SEQ ID NO: 7), Prothrombin (UniProt Accession No. P00734) (SEQ ID NO: 4), Hemoglobin subunit alpha (UniProt Accession No. P69905) (SEQ ID NO: 70), Haptoglobin (UniProt Accession No. P00738) (SEQ ID NO: 6), Integrin alpha-Iib (UniProt Accession No. P08514) (SEQ ID NO: 54), Plasminogen (UniProt Accession No. P00747) (SEQ ID NO: 8), Serum paraoxonase/arylesterase 1 (UniProt Accession No. P27169) (SEQ ID NO: 65), Serum paraoxonase/lactonase 3 (UniProt Accession No. Q15166) (SEQ ID NO: 72), Peroxiredoxin-2 (UniProt Accession No. P32119) (SEQ ID NO: 66), Antithrombin-III (UniProt Accession No. P01008) (SEQ ID NO. 11), Heparin cofactor 2 (UniProt Accession No. P05546) (SEQ ID NO: 50), von Willebrand factor (UniProt Accession No. P04275) (SEQ ID NO: 45) or combinations thereof.

[0164] In some embodiments, the disease is renal failure and the proteins are any one or more of Angiotensinogen (UniProt Accession No. P01019) (SEQ ID NO: 14), Serum albumin (UniProt Accession No. P02768) (SEQ ID NO: 36), Apolipoprotein B-100 (UniProt Accession No. P04114) (SEQ ID NO: 43), Complement C3 (UniProt Accession No. P01024) (SEQ ID NO: 16), Complement C4-A (UniProt Accession No. P0C0L4) (SEQ ID NO: 59), Complement C5 (UniProt Accession No. P01031) (SEQ ID NO: 17), Complement factor B (UniProt Accession No. P00751) (SEQ ID NO: 10), C-reactive protein (UniProt Accession No. P02741) (SEQ ID NO: 28), Coagulation factor X (UniProt Accession No. P00742) (SEQ ID NO: 7), Prothrombin (UniProt Accession No. P00734) (SEQ ID NO: 4), Hemoglobin subunit alpha (UniProt Accession No. P69905) (SEQ ID NO: 70), Antithrombin-III (UniProt Accession No. P01008) (SEQ ID NO: 11), Serotransferrin (UniProt Accession No. P02787) (SEQ ID NO: 38), or combinations thereof.

[0165] In some embodiments, the cardiovascular disease is selected from congestive heart failure, arrhythmia, pericarditis, acute myocardial infarction, infarcted myocardium, coronary artery disease, coronary heart disease, ischemic heart disease, cardiomyopathy, stroke, hypertensive heart disease, heart failure, pulmonary heart disease, ischemic syndrome, coronary microvascular disease, cardiac dysrhythmias, rheumatic heart disease, aortic aneurysms, cardiomyopathy, atrial fibrillation, congenital heart disease, endocarditis, inflammatory heart disease, inflammatory cardiomegaly, myocarditis, valvular heart disease, cerebrovascular disease, peripheral artery disease or any combination thereof.

[0166] In some embodiments, the disease is cardiovascular disease and the proteins are any one or more of Angiotensinogen (UniProt Accession No. P01019) (SEQ ID NO: 14), Apolipoprotein A-I (UniProt Accession No. P02647) (SEQ ID NO: 21), Apolipoprotein B-100 (UniProt Accession No. P04114) (SEQ ID NO: 43), Apolipoprotein E (UniProt Accession No. P02649) (SEQ ID NO: 22), Complement C3 (UniProt Accession No. P01024) (SEQ ID NO: 16), Complement C4-A (UniProt Accession No. P0C0L4) (SEQ ID NO: 59), Complement C5 (UniProt Accession No. P01031) (SEQ ID NO: 17), Clusterin (UniProt Accession No. P10909) (SEQ ID NO: 61), C-reactive protein (UniProt Accession No. P02741) (SEQ ID NO: 28), Coagulation factor X (UniProt Accession No. P00742) (SEQ ID NO: 7), Coagulation factor XII (UniProt Accession No. P00748) (SEQ ID NO: 9), Prothrombin (UniProt Accession No. P00734) (SEQ ID NO: 4), Gelsolin (UniProt Accession No. P06396) (SEQ ID NO: 51), Integrin alpha-Iib (UniProt Accession No. P08514) (SEQ ID NO: 54), Apolipoprotein(a) (UniProt Accession No. P08519) (SEQ ID NO: 55), Plasminogen (UniProt Accession No. P00747) (SEQ ID NO: 8), Serum paraoxonase/arylesterase 1 (UniProt Accession No. P27169) (SEQ ID NO: 65), Antithrombin-III (UniProt Accession No. P01008) (SEQ ID NO: 11), Plasma protease C1 inhibitor (UniProt Accession No. P05155) (SEQ ID NO: 48), von Willebrand factor (UniProt Accession No. P04275) (SEQ ID NO: 45), or combinations thereof.

[0167] In some embodiments, the disease is cardiovascular disease and the proteins are any one or more of Angiotensinogen (UniProt Accession No. P01019) (SEQ ID NO: 14), Apolipoprotein A-I (UniProt Accession No. P02647) ((SEQ ID NO: 21), Apolipoprotein B-100 (UniProt Accession No. P04114) (SEQ ID NO: 43), Apolipoprotein E (UniProt Accession No. P02649) (SEQ ID NO: 22), Complement C3 (UniProt Accession No. P01024) (SEQ ID NO: 16), Complement C4-A (UniProt Accession No. P0C0L4) (SEQ ID NO: 59), Complement C4-B (UniProt Accession No. P0C0L5) (SEQ ID NO: 60), Complement C5 (UniProt Accession No. P01031) (SEQ ID NO: 17), Clusterin (UniProt Accession No. P10909) (SEQ ID NO: 61), C-reactive protein (UniProt Accession No. P02741) (SEQ ID NO: 28), Coagulation factor X (UniProt Accession No. P00742) (SEQ ID NO: 7), Coagulation factor XII (UniProt Accession No. P00748) (SEQ ID NO: 9), Prothrombin (UniProt Accession No. P00734) (SEQ ID NO: 4), Gelsolin (UniProt Accession No. P06396) (SEQ ID NO: 51), Integrin alpha-Iib (UniProt Accession No. P08514) (SEQ ID NO: 54), Apolipoprotein(a) (UniProt Accession No. P08519) (SEQ ID NO: 55), Plasminogen (UniProt Accession No. P00747) (SEQ ID NO: 8), Serum paraoxonase/arylesterase 1 (UniProt Accession No. P27169) (SEQ ID NO: 65), Antithrombin-III Accession No. P01008) (SEQ ID NO: 11), Alpha-2-antiplasmin (UniProt Accession No. P08697) (SEQ ID NO: 57), Plasma protease C1 inhibitor (UniProt Accession No. P05155) (SEQ ID NO: 48), von Willebrand factor (UniProt Accession No. P04275) (SEQ ID NO: 45), or combinations thereof.

[0168] In some embodiments, the disease is liver disease and the proteins are any one or more of Alpha-1B-glycoprotein (UniProt Accession No. P04217) (SEQ ID NO: 44), Alpha-2-macroglobulin (UniProt Accession No. P01023) (SEQ ID NO: 15), Afamin (UniProt Accession No. P43652) (SEQ ID NO: 68), Angiotensinogen (UniProt Accession No. P01019) (SEQ ID NO: 14), Alpha-2-HS-glycoprotein (UniProt Accession No. P02765) (SEQ ID NO: 35), Serum albumin (UniProt Accession No. P02768) (SEQ ID NO: 36), Protein AMBP (UniProt Accession No. P02760) (SEQ ID NO: 33), Apolipoprotein A-I (UniProt Accession No. P02647) (SEQ ID NO: 21), Apolipoprotein A-II (UniProt Accession No. P02652) (SEQ ID NO: 23), Apolipoprotein B-100 (UniProt Accession No. P04114) (SEQ ID NO: 43), Apolipoprotein C-I (UniProt Accession No. P02654) (SEQ ID NO: 24), Apolipoprotein E (UniProt Accession No. P02649) (SEQ ID NO: 22), Apolipoprotein L1 (UniProt Accession No. 014791) (SEQ ID NO: 1), Complement C1q subcomponent subunit C (UniProt Accession No. P02747) (SEQ ID NO: 30), Complement C1r subcomponent (UniProt Accession No. P00736) (SEQ ID NO: 5), Complement C1s subcomponent (UniProt Accession No. P09871) (SEQ ID NO: 58), Complement C3 (UniProt Accession No. P01024) (SEQ ID NO: 16), Complement C4-A (UniProt Accession No. P0C0L4) (SEQ ID NO: 59), Complement C4-B (UniProt Accession No. P0C0L5) (SEQ ID NO: 60), C4b-binding protein alpha chain (UniProt Accession No. P04003) (SEQ ID NO: 41), Complement C5 (UniProt Accession No. P01031) (SEQ ID NO: 17), Complement component C8 alpha chain (UniProt Accession No. P07357) (SEQ ID NO: 53), Complement component C9 (UniProt Accession No. P02748) (SEQ ID NO: 31), Complement factor B (UniProt Accession No. P00751) (SEQ ID NO: 10), Complement factor H (UniProt Accession No. P08603) (SEQ ID NO: 56), Clusterin (UniProt Accession No. P10909) (SEQ ID NO: 61), Ceruloplasmin (UniProt Accession No. P00450) (SEQ ID NO: 2), C-reactive protein (UniProt Accession No. P02741) (SEQ ID NO: 28), Coagulation factor X (UniProt Accession No. P00742) (SEQ ID NO: 7), Coagulation factor XII (UniProt Accession No. P00748) (SEQ ID NO: 9), Prothrombin (UniProt Accession No. P00734) (SEQ ID NO: 4), Fibrinogen (UniProt Accession No. P02671) (SEQ ID NO: 27), Vitamin D-binding protein (UniProt Accession No. P02774) (SEQ ID NO: 37), Gelsolin (UniProt Accession No. P06396) (SEQ ID NO: 51), Hemoglobin subunit alpha (UniProt Accession No. P69905) (SEQ ID NO: 70), Haptoglobin (UniProt Accession No. P00738) (SEQ ID NO: 6), Hemopexin (UniProt Accession No. P02790) (SEQ ID NO: 39), Integrin alpha-Iib (UniProt Accession No. P08514) (SEQ ID NO: 54), Inter-alpha-trypsin inhibitor heavy chain H1 (UniProt Accession No. P19827) (SEQ ID NO: 63), Inter-alpha-trypsin inhibitor heavy chain H2 (UniProt Accession No. P19823) (SEQ ID NO: 62), Inter-alpha-trypsin inhibitor heavy chain H4 (UniProt Accession No. Q14624) (SEQ ID NO: 71), Plasma kallikrein (UniProt Accession No. P03952) (SEQ ID NO: 40), Apolipoprotein(a) (UniProt Accession No. P08519) (SEQ ID NO: 55), Leucine-rich alpha-2-glycoprotein (UniProt Accession No. P02750) (SEQ ID NO: 32), Lumican (UniProt Accession No. P51884) (SEQ ID NO: 69), Alpha-1-acid glycoprotein 1 (UniProt Accession No. P02763) (SEQ ID NO: 34), Plasminogen (UniProt Accession No. P00747) (SEQ ID NO: 8), Serum paraoxonase/arylesterase 1 (UniProt Accession No. P27169) (SEQ ID NO: 65), Serum paraoxonase/lactonase 3 (UniProt Accession No. Q15166) (SEQ ID NO: 72), Peroxiredoxin-2 (UniProt Accession No. P32119) (SEQ ID NO: 66), Serum amyloid A-4 protein (UniProt Accession No. P35542) (SEQ ID NO: 67), Alpha-1-antitrypsin (UniProt Accession No. P01009) (SEQ ID NO: 12), Alpha-1-antichymotrypsin (UniProt Accession No. P01011) (SEQ ID NO: 13), Antithrombin-III (UniProt Accession No. P01008) (SEQ ID NO: 11), Heparin cofactor 2 (UniProt Accession No. P05546) (SEQ ID NO: 50), Plasma protease C1 inhibitor (UniProt Accession No. P05155) (SEQ ID NO: 48), Serotransferrin (UniProt Accession No. P02787) (SEQ ID NO: 38), Vitronectin (UniProt Accession No. P04004) (SEQ ID NO: 42), von Willebrand factor (UniProt Accession No. P04275) (SEQ ID NO: 45), or combinations thereof.

[0169] In some embodiments, the disease is vascular disease and the proteins are any one or more of Angiotensinogen (UniProt Accession No. P01019) (SEQ ID NO: 14), Alpha-2-HS-glycoprotein (UniProt Accession No. P02765) (SEQ ID NO: 35), Apolipoprotein A-I UniProt Accession No. P02647) (SEQ ID NO: 21), Apolipoprotein A-II (UniProt Accession No.) (SEQ ID NO: 23), Apolipoprotein A-IV (UniProt Accession No. P06727) (SEQ ID NO: 52), Apolipoprotein B-100 (UniProt Accession No. P04114) (SEQ ID NO: 43), Apolipoprotein C-I (UniProt Accession No. P02654) (SEQ ID NO: 24), Apolipoprotein C-II (UniProt Accession No. P02655) (SEQ ID NO: 25), Apolipoprotein (UniProt Accession No. P02656) (SEQ ID NO: 26), Apolipoprotein E (UniProt Accession No. P02649) (SEQ ID NO: 22), Complement C5 (UniProt Accession No. P01031) (SEQ ID NO: 17), Clusterin (UniProt Accession No. P10909) (SEQ ID NO: 61), C-reactive protein (UniProt Accession No. P02741) (SEQ ID NO: 28), Coagulation factor X (UniProt Accession No. P00742) (SEQ ID NO: 7), Prothrombin (UniProt Accession No. P00734) (SEQ ID NO: 4), Hemoglobin subunit alpha (UniProt Accession No. P69905) (SEQ ID NO: 70), Haptoglobin (UniProt Accession No. P00738) (SEQ ID NO: 6), Integrin alpha-Iib (UniProt Accession No. P08514) (SEQ ID NO: 54), Apolipoprotein(a) (UniProt Accession No. P08519) (SEQ ID NO: 55), Plasminogen (UniProt Accession No. P00747) (SEQ ID NO: 8), Serum paraoxonase/arylesterase 1 (UniProt Accession No. P27169) (SEQ ID NO: 65), Serum paraoxonase/lactonase 3 (UniProt Accession No. Q15166) (SEQ ID NO: 72), Peroxiredoxin-2 (UniProt Accession No. P32119) (SEQ ID NO: 66), Antithrombin-III (UniProt Accession No. P01008) (SEQ ID NO: 11), Heparin cofactor 2 (UniProt Accession No. P05546) (SEQ ID NO: 50), von Willebrand factor (UniProt Accession No. P04275) (SEQ ID NO: 45), or combinations thereof.

[0170] In some embodiments, the disease is lung damage and the proteins are any one or more of Alpha-2-HS-glycoprotein (UniProt Accession No. P02765) (SEQ ID NO: 35), Serum albumin (UniProt Accession No. P02768) (SEQ ID NO: 36), Protein AMBP (UniProt Accession No. P02760) (SEQ ID NO: 33), Zinc-alpha-2-glycoprotein (UniProt Accession No. P25311) (SEQ ID NO: 64), Complement C3 (UniProt Accession No. P01024) (SEQ ID NO: 16), Complement C5 (UniProt Accession No. P01031) (SEQ ID NO: 17), Complement factor B (UniProt Accession No. P00751) (SEQ ID NO: 10), Clusterin (UniProt Accession No. P10909) (SEQ ID NO: 61), C-reactive protein (UniProt Accession No. P02741) (SEQ ID NO: 28), Coagulation factor XII (UniProt Accession No. P00748 (SEQ ID NO: 9), Vitamin D-binding protein (UniProt Accession No. P02774) (SEQ ID NO: 37), Hemoglobin subunit alpha (UniProt Accession No. P69905) (SEQ ID NO: 70), Plasma protease C1 inhibitor (UniProt Accession No. P05155) (SEQ ID NO; 48), Serotransferrin (UniProt Accession No. P02787) (SEQ ID NO: 38), von Willebrand factor (UniProt Accession No. P04275) (SEQ ID NO: 45), or combinations thereof.

[0171] In some embodiments, the disease is lung damage and the proteins are any one or more of Alpha-2-HS-glycoprotein (UniProt Accession No. P02765) (SEQ ID NO: 35), Serum albumin (UniProt Accession No. P02768) (SEQ ID NO: 36), Protein AMBP (UniProt Accession No. P02760) (SEQ ID NO: 33), Zinc-alpha-2-glycoprotein (UniProt Accession No. P25311) (SEQ ID NO: 64), Complement C3 (UniProt Accession No. P01024) (SEQ ID NO: 16), Complement C5 (UniProt Accession No. P01031) (SEQ ID NO: 17), Complement factor B (UniProt Accession No. P00751) (SEQ ID NO: 10), Clusterin (UniProt Accession No. P10909) (SEQ ID NO: 61), Vitamin D-binding protein (UniProt Accession No. P02774) (SEQ ID NO: 37), Hemoglobin subunit alpha (UniProt Accession No. P69905) (SEQ ID NO: 70), Plasma protease C1 inhibitor (UniProt Accession No. P05155) (SEQ ID NO; 48), Serotransferrin (UniProt Accession No. P02787) (SEQ ID NO: 38), von Willebrand factor (UniProt Accession No. P04275) (SEQ ID NO: 45), or combinations thereof

[0172] Protein Panels

[0173] In various embodiments, the present invention provides a protein panel, the panel comprising, consisting essentially of, or consisting of one or more proteins listed in the following Table:

| | UniProt | SEQ |
|---|---|---|
| Protein Name | Accession No. | ID NO: |
| Apolipoprotein L1 | O14791 | 1 |
| Ceruloplasmin | P00450 | 2 |
| Beta-galactosidase | P00722 | 3 |
| Prothrombin | P00734 | 4 |
| Complement C1r subcomponent | P00736 | 5 |
| Haptoglobin | P00738 | 6 |
| Coagulation factor X | P00742 | 7 |
| Plasminogen | P00747 | 8 |
| Coagulation factor XII | P00748 | 9 |
| Complement factor B | P00751 | 10 |
| Antithrombin-III | P01008 | 11 |
| Alpha-1-antitrypsin | P01009 | 12 |
| Alpha-1-antichymotrypsin | P01011 | 13 |
| Angiotensinogen | P01019 | 14 |
| Alpha-2-macroglobulin | P01023 | 15 |
| Complement C3 | P01024 | 16 |
| Complement C5 | P01031 | 17 |
| Ig gamma-3 chain C region | P01860 | 18 |
| Ig mu chain C region | P01871 | 19 |
| Ig alpha-1 chain C region | P01876 | 20 |
| Apolipoprotein A-I | P02647 | 21 |
| Apolipoprotein E | P02649 | 22 |
| Apolipoprotein A-II | P02652 | 23 |
| Apolipoprotein C-I | P02654 | 24 |
| Apolipoprotein C-II | P02655 | 25 |
| Apolipoprotein C-III | P02656 | 26 |
| Fibrinogen | P02671 | 27 |
| C-reactive protein | P02741 | 28 |
| Complement C1q subcomponent subunit B | P02746 | 29 |
| Complement C1q subcomponent subunit C | P02747 | 30 |
| Complement component C9 | P02748 | 31 |
| Leucine-rich alpha-2-glycoprotein | P02750 | 32 |
| Protein AMBP | P02760 | 33 |
| Alpha-1-acid glycoprotein 1 | P02763 | 34 |
| Alpha-2-HS-glycoprotein | P02765 | 35 |
| Serum albumin | P02768 | 36 |
| Vitamin D-binding protein | P02774 | 37 |
| Serotransferrin | P02787 | 38 |
| Hemopexin | P02790 | 39 |
| Plasma kallikrein | P03952 | 40 |
| C4b-binding protein alpha chain | P04003 | 41 |
| Vitronectin | P04004 | 42 |
| Apolipoprotein B-100 | P04114 | 43 |
| Alpha-1B-glycoprotein | P04217 | 44 |
| von Willebrand factor | P04275 | 45 |
| Sex hormone-binding globulin | P04278 | 46 |
| Plasma serine protease inhibitor | P05154 | 47 |
| Plasma protease C1 inhibitor | P05155 | 48 |
| Thyroxine-binding globulin | P05543 | 49 |
| Heparin cofactor 2 | P05546 | 50 |
| Gelsolin | P06396 | 51 |
| Apolipoprotein A-IV | P06727 | 52 |
| Complement component C8 alpha chain | P07357 | 53 |
| Integrin alpha-Iib | P08514 | 54 |
| Apolipoprotein(a) | P08519 | 55 |
| Complement factor H | P08603 | 56 |
| Alpha-2-antiplasmin | P08697 | 57 |
| Complement C1s subcomponent | P09871 | 58 |
| Complement C4-A | P0C0L4 | 59 |
| Complement C4-B | P0C0L5 | 60 |
| Clusterin | P10909 | 61 |
| Inter-alpha-trypsin inhibitor heavy chain H2 | P19823 | 62 |
| Inter-alpha-trypsin inhibitor heavy chain H1 | P19827 | 63 |
| Zinc-alpha-2-glycoprotein | P25311 | 64 |
| Serum paraoxonase/arylesterase 1 | P27169 | 65 |
| Peroxiredoxin-2 | P32119 | 66 |
| Serum amyloid A-4 protein | P35542 | 67 |
| Afamin | P43652 | 68 |
| Lumican | P51884 | 69 |
| Hemoglobin subunit alpha | P69905 | 70 |
| Inter-alpha-trypsin inhibitor heavy chain H4 | Q14624 | 71 |
| Serum paraoxonase/lactonase 3 | Q15166 | 72 |

[0174] In various embodiments, the protein panel comprises, consists essentially of, or consists of 1 or more; 2 or more; 3 or more; 4 or more; 5 or more; 6 or more; 7 or more; 8 or more; 9 or more; 10 or more; 11 or more; 12 or more; 13 or more; 14 or more; 15 or more; 16 or more; 17 or more; 18 or more; 19 or more; 20 or more; 21 or more; 22 or more; 23 or more; 24 or more; 25 or more; 26 or more; 27 or more; 28 or more; 29 or more; 30 or more; 31 or more; 32 or more; 33 or more; 34 or more; 35 or more; 36 or more; 37 or more; 38 or more; 39 or more; 40 or more; 41 or more; 42 or more; 43 or more; 44 or more; 45 or more; 46 or more; 47 or more; 48 or more; 49 or more; 50 or more; 51 or more; 52 or more; 53 or more; 54 or more; 55 or more; 56 or more; 57 or more; 58 or more; 59 or more; 60 or more; 61 or more; 62 or more; 63 or more; 64 or more; 65 or more; 66 or more; 67 or more; 68 or more; 69 or more; 70 or more; 71 or more; or 72; or all of the proteins listed in the following Table:

| | UniProt | SEQ |
|---|---|---|
| Protein Name | Accession No. | ID NO: |
| Apolipoprotein L1 | O14791 | 1 |
| Ceruloplasmin | P00450 | 2 |
| Beta-galactosidase | P00722 | 3 |
| Prothrombin | P00734 | 4 |
| Complement C1r subcomponent | P00736 | 5 |
| Haptoglobin | P00738 | 6 |
| Coagulation factor X | P00742 | 7 |
| Plasminogen | P00747 | 8 |
| Coagulation factor XII | P00748 | 9 |
| Complement factor B | P00751 | 10 |
| Antithrombin-III | P01008 | 11 |
| Alpha-1-antitrypsin | P01009 | 12 |
| Alpha-1-antichymotrypsin | P01011 | 13 |
| Angiotensinogen | P01019 | 14 |
| Alpha-2-macroglobulin | P01023 | 15 |
| Complement C3 | P01024 | 16 |
| Complement C5 | P01031 | 17 |
| Ig gamma-3 chain C region | P01860 | 18 |
| Ig mu chain C region | P01871 | 19 |
| Ig alpha-1 chain C region | P01876 | 20 |
| Apolipoprotein A-I | P02647 | 21 |
| Apolipoprotein E | P02649 | 22 |
| Apolipoprotein A-II | P02652 | 23 |
| Apolipoprotein C-I | P02654 | 24 |
| Apolipoprotein C-II | P02655 | 25 |
| Apolipoprotein C-III | P02656 | 26 |
| Fibrinogen | P02671 | 27 |
| C-reactive protein | P02741 | 28 |
| Complement C1q subcomponent subunit B | P02746 | 29 |
| Complement C1q subcomponent subunit C | P02747 | 30 |
| Complement component C9 | P02748 | 31 |
| Leucine-rich alpha-2-glycoprotein | P02750 | 32 |
| Protein AMBP | P02760 | 33 |
| Alpha-1-acid glycoprotein 1 | P02763 | 34 |
| Alpha-2-HS-glycoprotein | P02765 | 35 |
| Serum albumin | P02768 | 36 |
| Vitamin D-binding protein | P02774 | 37 |
| Serotransferrin | P02787 | 38 |
| Hemopexin | P02790 | 39 |
| Plasma kallikrein | P03952 | 40 |
| C4b-binding protein alpha chain | P04003 | 41 |
| Vitronectin | P04004 | 42 |
| Apolipoprotein B-100 | P04114 | 43 |
| Alpha-1B-glycoprotein | P04217 | 44 |
| von Willebrand factor | P04275 | 45 |
| Sex hormone-binding globulin | P04278 | 46 |
| Plasma serine protease inhibitor | P05154 | 47 |
| Plasma protease C1 inhibitor | P05155 | 48 |
| Thyroxine-binding globulin | P05543 | 49 |
| Heparin cofactor 2 | P05546 | 50 |
| Gelsolin | P06396 | 51 |
| Apolipoprotein A-IV | P06727 | 52 |
| Complement component C8 alpha chain | P07357 | 53 |
| Integrin alpha-Iib | P08514 | 54 |
| Apolipoprotein(a) | P08519 | 55 |
| Complement factor H | P08603 | 56 |
| Alpha-2-antiplasmin | P08697 | 57 |
| Complement C1s subcomponent | P09871 | 58 |
| Complement C4-A | P0C0L4 | 59 |
| Complement C4-B | P0C0L5 | 60 |
| Clusterin | P10909 | 61 |
| Inter-alpha-trypsin inhibitor heavy chain H2 | P19823 | 62 |
| Inter-alpha-trypsin inhibitor heavy chain H1 | P19827 | 63 |
| Zinc-alpha-2-glycoprotein | P25311 | 64 |
| Serum paraoxonase/arylesterase 1 | P27169 | 65 |
| Peroxiredoxin-2 | P32119 | 66 |
| Serum amyloid A-4 protein | P35542 | 67 |
| Afamin | P43652 | 68 |
| Lumican | P51884 | 69 |
| Hemoglobin subunit alpha | P69905 | 70 |
| Inter-alpha-trypsin inhibitor heavy chain H4 | Q14624 | 71 |
| Serum paraoxonase/lactonase 3 | Q15166 | 72 |

[0175] In various embodiments, the present invention provides a protein panel, the panel comprising, consisting essentially of, or consisting of the proteins listed in the following Table:

| | UniProt | SEQ |
|---|---|---|
| Protein Name | Accession No. | ID NO: |
| Apolipoprotein L1 | O14791 | 1 |
| Ceruloplasmin | P00450 | 2 |
| Beta-galactosidase | P00722 | 3 |
| Prothrombin | P00734 | 4 |
| Complement C1r subcomponent | P00736 | 5 |
| Haptoglobin | P00738 | 6 |
| Coagulation factor X | P00742 | 7 |
| Plasminogen | P00747 | 8 |
| Coagulation factor XII | P00748 | 9 |
| Complement factor B | P00751 | 10 |
| Antithrombin-III | P01008 | 11 |
| Alpha-1-antitrypsin | P01009 | 12 |
| Alpha-1-antichymotrypsin | P01011 | 13 |
| Angiotensinogen | P01019 | 14 |
| Alpha-2-macroglobulin | P01023 | 15 |
| Complement C3 | P01024 | 16 |
| Complement C5 | P01031 | 17 |
| Ig gamma-3 chain C region | P01860 | 18 |
| Ig mu chain C region | P01871 | 19 |
| Ig alpha-1 chain C region | P01876 | 20 |
| Apolipoprotein A-I | P02647 | 21 |
| Apolipoprotein E | P02649 | 22 |
| Apolipoprotein A-II | P02652 | 23 |
| Apolipoprotein C-I | P02654 | 24 |
| Apolipoprotein C-II | P02655 | 25 |
| Apolipoprotein C-III | P02656 | 26 |
| Fibrinogen | P02671 | 27 |
| C-reactive protein | P02741 | 28 |
| Complement C1q subcomponent subunit B | P02746 | 29 |
| Complement C1q subcomponent subunit C | P02747 | 30 |
| Complement component C9 | P02748 | 31 |
| Leucine-rich alpha-2-glycoprotein | P02750 | 32 |
| Protein AMBP | P02760 | 33 |
| Alpha-1-acid glycoprotein 1 | P02763 | 34 |
| Alpha-2-HS-glycoprotein | P02765 | 35 |
| Serum albumin | P02768 | 36 |
| Vitamin D-binding protein | P02774 | 37 |
| Serotransferrin | P02787 | 38 |
| Hemopexin | P02790 | 39 |
| Plasma kallikrein | P03952 | 40 |
| C4b-binding protein alpha chain | P04003 | 41 |
| Vitronectin | P04004 | 42 |
| Apolipoprotein B-100 | P04114 | 43 |
| Alpha-1B-glycoprotein | P04217 | 44 |
| von Willebrand factor | P04275 | 45 |
| Sex hormone-binding globulin | P04278 | 46 |
| Plasma serine protease inhibitor | P05154 | 47 |
| Plasma protease C1 inhibitor | P05155 | 48 |
| Thyroxine-binding globulin | P05543 | 49 |
| Heparin cofactor 2 | P05546 | 50 |
| Gelsolin | P06396 | 51 |
| Apolipoprotein A-IV | P06727 | 52 |
| Complement component C8 alpha chain | P07357 | 53 |
| Integrin alpha-Iib | P08514 | 54 |
| Apolipoprotein(a) | P08519 | 55 |
| Complement factor H | P08603 | 56 |
| Alpha-2-antiplasmin | P08697 | 57 |
| Complement C1s subcomponent | P09871 | 58 |
| Complement C4-A | P0C0L4 | 59 |
| Complement C4-B | P0C0L5 | 60 |
| Clusterin | P10909 | 61 |
| Inter-alpha-trypsin inhibitor heavy chain H2 | P19823 | 62 |
| Inter-alpha-trypsin inhibitor heavy chain H1 | P19827 | 63 |
| Zinc-alpha-2-glycoprotein | P25311 | 64 |
| Serum paraoxonase/arylesterase 1 | P27169 | 65 |
| Peroxiredoxin-2 | P32119 | 66 |
| Serum amyloid A-4 protein | P35542 | 67 |
| Afamin | P43652 | 68 |
| Lumican | P51884 | 69 |
| Hemoglobin subunit alpha | P69905 | 70 |
| Inter-alpha-trypsin inhibitor heavy chain H4 | Q14624 | 71 |
| Serum paraoxonase/lactonase 3 | Q15166 | 72 |

[0176] In various embodiments, the present invention provides a protein panel for assessing and/or determining the state of health of a subject, the panel comprising one or more proteins listed in the following Table:

| | UniProt | SEQ |
|---|---|---|
| Protein Name | Accession No. | ID NO: |
| Apolipoprotein L1 | O14791 | 1 |
| Ceruloplasmin | P00450 | 2 |
| Beta-galactosidase | P00722 | 3 |
| Prothrombin | P00734 | 4 |
| Complement C1r subcomponent | P00736 | 5 |
| Haptoglobin | P00738 | 6 |
| Coagulation factor X | P00742 | 7 |
| Plasminogen | P00747 | 8 |
| Coagulation factor XII | P00748 | 9 |
| Complement factor B | P00751 | 10 |
| Antithrombin-III | P01008 | 11 |
| Alpha-1-antitrypsin | P01009 | 12 |
| Alpha-1-antichymotrypsin | P01011 | 13 |
| Angiotensinogen | P01019 | 14 |
| Alpha-2-macroglobulin | P01023 | 15 |
| Complement C3 | P01024 | 16 |
| Complement C5 | P01031 | 17 |
| Ig gamma-3 chain C region | P01860 | 18 |
| Ig mu chain C region | P01871 | 19 |
| Ig alpha-1 chain C region | P01876 | 20 |
| Apolipoprotein A-I | P02647 | 21 |
| Apolipoprotein E | P02649 | 22 |
| Apolipoprotein A-II | P02652 | 23 |
| Apolipoprotein C-I | P02654 | 24 |
| Apolipoprotein C-II | P02655 | 25 |
| Apolipoprotein C-III | P02656 | 26 |
| Fibrinogen | P02671 | 27 |
| C-reactive protein | P02741 | 28 |
| Complement C1q subcomponent subunit B | P02746 | 29 |
| Complement C1q subcomponent subunit C | P02747 | 30 |
| Complement component C9 | P02748 | 31 |
| Leucine-rich alpha-2-glycoprotein | P02750 | 32 |
| Protein AMBP | P02760 | 33 |
| Alpha-1-acid glycoprotein 1 | P02763 | 34 |
| Alpha-2-HS-glycoprotein | P02765 | 35 |
| Serum albumin | P02768 | 36 |
| Vitamin D-binding protein | P02774 | 37 |
| Serotransferrin | P02787 | 38 |
| Hemopexin | P02790 | 39 |
| Plasma kallikrein | P03952 | 40 |
| C4b-binding protein alpha chain | P04003 | 41 |
| Vitronectin | P04004 | 42 |
| Apolipoprotein B-100 | P04114 | 43 |
| Alpha-1B-glycoprotein | P04217 | 44 |
| von Willebrand factor | P04275 | 45 |
| Sex hormone-binding globulin | P04278 | 46 |
| Plasma serine protease inhibitor | P05154 | 47 |
| Plasma protease C1 inhibitor | P05155 | 48 |
| Thyroxine-binding globulin | P05543 | 49 |
| Heparin cofactor 2 | P05546 | 50 |
| Gelsolin | P06396 | 51 |
| Apolipoprotein A-IV | P06727 | 52 |
| Complement component C8 alpha chain | P07357 | 53 |
| Integrin alpha-Iib | P08514 | 54 |
| Apolipoprotein(a) | P08519 | 55 |
| Complement factor H | P08603 | 56 |
| Alpha-2-antiplasmin | P08697 | 57 |
| Complement C1s subcomponent | P09871 | 58 |
| Complement C4-A | P0C0L4 | 59 |
| Complement C4-B | P0C0L5 | 60 |
| Clusterin | P10909 | 61 |
| Inter-alpha-trypsin inhibitor heavy chain H2 | P19823 | 62 |
| Inter-alpha-trypsin inhibitor heavy chain H1 | P19827 | 63 |
| Zinc-alpha-2-glycoprotein | P25311 | 64 |
| Serum paraoxonase/arylesterase 1 | P27169 | 65 |
| Peroxiredoxin-2 | P32119 | 66 |
| Serum amyloid A-4 protein | P35542 | 67 |
| Afamin | P43652 | 68 |
| Lumican | P51884 | 69 |
| Hemoglobin subunit alpha | P69905 | 70 |
| Inter-alpha-trypsin inhibitor heavy chain H4 | Q14624 | 71 |
| Serum paraoxonase/lactonase 3 | Q15166 | 72 |

[0177] In some embodiments, the one or more proteins are biomarkers for one or more functions or combination thereof. In some embodiments, the functions are cardiovascular function, immune mediated inflammation, lipid metabolism, redox signaling, immune response, hematological system development, hematological system function, reproductive system development, reproductive system function, gene expression, etc. In some embodiments, the function is selected from cardiovascular function, immune mediated inflammation, lipid metabolism, redox signaling, immune response, hematological system development, hematological system function, reproductive system development, reproductive system function, and gene expression.

[0178] In some embodiments, the one or more proteins are biomarkers for one or more functions or combination thereof. In some embodiments, the functions are inflammatory response, lipid metabolism, redox signaling, lung damage, immune response, or endothelial dysfunction.

[0179] In some embodiments, the one or more proteins are biomarkers for one or more diseases or combination thereof. In some embodiments, the disease is atherosclerosis, renal failure, cardiovascular disease or any combination thereof.

[0180] In some embodiments, the protein panel is a biomarker panel. In some embodiments, the protein panel is a protein biomarker panel.

[0181] In some embodiments, the protein panel can be used for any one or more of the following: identifying one or more functions in a subject; diagnosing one or more diseases in a subject; assessing and/or determining the state of health of a subject; determining the prognosis of a subject; determining the efficacy of a treatment of a subject; identifying the presence, absence, amount, or level of one or more proteins in a sample; obtaining a biomarker signature for a sample; and/or determining the risk of developing one or more diseases in a subject.

[0182] In various embodiments, the present invention provides a protein panel for assessing and/or determining the state of health of a subject; diagnosing a disease in a subject; assessing and/or determining the risk of developing a disease in a subject; prognosing a disease of a subject; identifying and/or detecting one or more proteins in a sample; the panel comprising one or more proteins listed in Table 15.

[0183] Methods of Obtaining a Biomarker Signature

[0184] In various embodiments, the present invention provides a method for obtaining a biomarker signature for a subject, comprising: obtaining a sample from the subject; contacting the sample with one or more proteases so as to obtain a digested sample, wherein the digested sample comprises one or more peptides; analyzing the digested sample by mass spectrometry so as to obtain mass spectrometry data; correlating the mass spectrometry data to the one or more peptides; and correlating the one or more peptides to one or more proteins so as to obtain the biomarker signature for the subject, wherein the one or more proteins are listed in the following Table:

| | UniProt | SEQ |
|---|---|---|
| Protein Name | Accession No. | ID NO: |
| Apolipoprotein L1 | O14791 | 1 |
| Ceruloplasmin | P00450 | 2 |
| Beta-galactosidase | P00722 | 3 |
| Prothrombin | P00734 | 4 |
| Complement C1r subcomponent | P00736 | 5 |
| Haptoglobin | P00738 | 6 |
| Coagulation factor X | P00742 | 7 |
| Plasminogen | P00747 | 8 |
| Coagulation factor XII | P00748 | 9 |
| Complement factor B | P00751 | 10 |
| Antithrombin-III | P01008 | 11 |
| Alpha-1-antitrypsin | P01009 | 12 |
| Alpha-1-antichymotrypsin | P01011 | 13 |
| Angiotensinogen | P01019 | 14 |
| Alpha-2-macroglobulin | P01023 | 15 |
| Complement C3 | P01024 | 16 |
| Complement C5 | P01031 | 17 |
| Ig gamma-3 chain C region | P01860 | 18 |
| Ig mu chain C region | P01871 | 19 |
| Ig alpha-1 chain C region | P01876 | 20 |
| Apolipoprotein A-I | P02647 | 21 |
| Apolipoprotein E | P02649 | 22 |
| Apolipoprotein A-II | P02652 | 23 |
| Apolipoprotein C-I | P02654 | 24 |
| Apolipoprotein C-II | P02655 | 25 |
| Apolipoprotein C-III | P02656 | 26 |
| Fibrinogen | P02671 | 27 |
| C-reactive protein | P02741 | 28 |
| Complement C1q subcomponent subunit B | P02746 | 29 |
| Complement C1q subcomponent subunit C | P02747 | 30 |
| Complement component C9 | P02748 | 31 |
| Leucine-rich alpha-2-glycoprotein | P02750 | 32 |
| Protein AMBP | P02760 | 33 |
| Alpha-1-acid glycoprotein 1 | P02763 | 34 |
| Alpha-2-HS-glycoprotein | P02765 | 35 |
| Serum albumin | P02768 | 36 |
| Vitamin D-binding protein | P02774 | 37 |
| Serotransferrin | P02787 | 38 |
| Hemopexin | P02790 | 39 |
| Plasma kallikrein | P03952 | 40 |
| C4b-binding protein alpha chain | P04003 | 41 |
| Vitronectin | P04004 | 42 |
| Apolipoprotein B-100 | P04114 | 43 |
| Alpha-1B-glycoprotein | P04217 | 44 |
| von Willebrand factor | P04275 | 45 |
| Sex hormone-binding globulin | P04278 | 46 |
| Plasma serine protease inhibitor | P05154 | 47 |
| Plasma protease C1 inhibitor | P05155 | 48 |
| Thyroxine-binding globulin | P05543 | 49 |
| Heparin cofactor 2 | P05546 | 50 |
| Gelsolin | P06396 | 51 |
| Apolipoprotein A-IV | P06727 | 52 |
| Complement component C8 alpha chain | P07357 | 53 |
| Integrin alpha-Iib | P08514 | 54 |
| Apolipoprotein(a) | P08519 | 55 |
| Complement factor H | P08603 | 56 |
| Alpha-2-antiplasmin | P08697 | 57 |
| Complement C1s subcomponent | P09871 | 58 |
| Complement C4-A | P0C0L4 | 59 |
| Complement C4-B | P0C0L5 | 60 |
| Clusterin | P10909 | 61 |
| Inter-alpha-trypsin inhibitor heavy chain H2 | P19823 | 62 |
| Inter-alpha-trypsin inhibitor heavy chain H1 | P19827 | 63 |
| Zinc-alpha-2-glycoprotein | P25311 | 64 |
| Serum paraoxonase/arylesterase 1 | P27169 | 65 |
| Peroxiredoxin-2 | P32119 | 66 |
| Serum amyloid A-4 protein | P35542 | 67 |
| Afamin | P43652 | 68 |
| Lumican | P51884 | 69 |
| Hemoglobin subunit alpha | P69905 | 70 |
| Inter-alpha-trypsin inhibitor heavy chain H4 | Q14624 | 71 |
| Serum paraoxonase/lactonase 3 | Q15166 | 72 |

[0185] In some embodiments, the biomarker signature comprises, consists essentially of, or consists of none; 1 or more; 2 or more; 3 or more; 4 or more; 5 or more; 6 or more; 7 or more; 8 or more; 9 or more; 10 or more; 11 or more; 12 or more; 13 or more; 14 or more; 15 or more; 16 or more; 17 or more; 18 or more; 19 or more; 20 or more; 21 or more; 22 or more; 23 or more; 24 or more; 25 or more; 26 or more; 27 or more; 28 or more; 29 or more; 30 or more; 31 or more; 32 or more; 33 or more; 34 or more; 35 or more; 36 or more; 37 or more; 38 or more; 39 or more; 40 or more; 41 or more; 42 or more; 43 or more; 44 or more; 45 or more; 46 or more; 47 or more; 48 or more; 49 or more; 50 or more; 51 or more; 52 or more; 53 or more; 54 or more; 55 or more; 56 or more; 57 or more; 58 or more; 59 or more; 60 or more; 61 or more; 62 or more; 63 or more; 64 or more; 65 or more; 66 or more; 67 or more; 68 or more; 69 or more; 70 or more; 71 or more; or 72; or all of the proteins listed in Table 15. In some embodiments, the biomarker signature is the biomarker signature for the subject. In some embodiments, the biomarker signature is the protein biomarker signature of the subject. In some embodiments, the biomarker signature is the reference biomarker signature. In some embodiments, the biomarker signature is the reference protein biomarker signature.

[0186] In some embodiments, the biomarker signature comprises, consists essentially of, or consists of 0, 1, 2, 3, 4, 5, 6, 7, 8, 9, 10, 11, 12, 13, 14, 15, 16, 17, 18, 19, 20, 21, 22, 23, 24, 25, 26, 27, 28, 29, 30, 31, 32, 33, 34, 35, 36, 37, 38, 39, 40, 41, 42, 43, 44, 45, 46, 47, 48, 49, 50, 51, 52, 53, 54, 55, 56, 57, 58, 59, 60, 61, 62, 63, 64, 65, 66, 67, 68, 69, 70, 71, or 72 of the proteins listed in Table 15.

[0187] In some embodiments, the biomarker signature from the subject comprises, consists essentially of, or consists of 0, 1, 2, 3, 4, 5, 6, 7, 8, 9, 10, 11, 12, 13, 14, 15, 16, 17, 18, 19, 20, 21, 22, 23, 24, 25, 26, 27, 28, 29, 30, 31, 32, 33, 34, 35, 36, 37, 38, 39, 40, 41, 42, 43, 44, 45, 46, 47, 48, 49, 50, 51, 52, 53, 54, 55, 56, 57, 58, 59, 60, 61, 62, 63, 64, 65, 66, 67, 68, 69, 70, 71, or 72 of the proteins listed in Table 15.

[0188] In some embodiments, the biomarker signature from the reference sample comprises, consists essentially of, or consists of 0, 1, 2, 3, 4, 5, 6, 7, 8, 9, 10, 11, 12, 13, 14, 15, 16, 17, 18, 19, 20, 21, 22, 23, 24, 25, 26, 27, 28, 29, 30, 31, 32, 33, 34, 35, 36, 37, 38, 39, 40, 41, 42, 43, 44, 45, 46, 47, 48, 49, 50, 51, 52, 53, 54, 55, 56, 57, 58, 59, 60, 61, 62, 63, 64, 65, 66, 67, 68, 69, 70, 71, or 72 of the proteins listed in Table 15.

[0189] In some embodiments, the reference biomarker signature comprises, consists essentially of, or consists of 0, 1, 2, 3, 4, 5, 6, 7, 8, 9, 10, 11, 12, 13, 14, 15, 16, 17, 18, 19, 20, 21, 22, 23, 24, 25, 26, 27, 28, 29, 30, 31, 32, 33, 34, 35, 36, 37, 38, 39, 40, 41, 42, 43, 44, 45, 46, 47, 48, 49, 50, 51, 52, 53, 54, 55, 56, 57, 58, 59, 60, 61, 62, 63, 64, 65, 66, 67, 68, 69, 70, 71, or 72 of the proteins listed in Table 15.

[0190] In some embodiments, the sample from the subject comprises, consists essentially of, or consists of 0, 1, 2, 3, 4, 5, 6, 7, 8, 9, 10, 11, 12, 13, 14, 15, 16, 17, 18, 19, 20, 21, 22, 23, 24, 25, 26, 27, 28, 29, 30, 31, 32, 33, 34, 35, 36, 37, 38, 39, 40, 41, 42, 43, 44, 45, 46, 47, 48, 49, 50, 51, 52, 53, 54, 55, 56, 57, 58, 59, 60, 61, 62, 63, 64, 65, 66, 67, 68, 69, 70, 71, or 72 of the proteins listed in Table 15.

[0191] In some embodiments, the reference sample comprises, consists essentially of, or consists of 0, 1, 2, 3, 4, 5, 6, 7, 8, 9, 10, 11, 12, 13, 14, 15, 16, 17, 18, 19, 20, 21, 22, 23, 24, 25, 26, 27, 28, 29, 30, 31, 32, 33, 34, 35, 36, 37, 38, 39, 40, 41, 42, 43, 44, 45, 46, 47, 48, 49, 50, 51, 52, 53, 54, 55, 56, 57, 58, 59, 60, 61, 62, 63, 64, 65, 66, 67, 68, 69, 70, 71, or 72 of the proteins listed in Table 15.

[0192] In some embodiments, the sample from the subject comprises, consists essentially of, or consists of none; 1 or more; 2 or more; 3 or more; 4 or more; 5 or more; 6 or more; 7 or more; 8 or more; 9 or more; 10 or more; 11 or more; 12 or more; 13 or more; 14 or more; 15 or more; 16 or more; 17 or more; 18 or more; 19 or more; 20 or more; 21 or more; 22 or more; 23 or more; 24 or more; 25 or more; 26 or more; 27 or more; 28 or more; 29 or more; 30 or more; 31 or more; 32 or more; 33 or more; 34 or more; 35 or more; 36 or more; 37 or more; 38 or more; 39 or more; 40 or more; 41 or more; 42 or more; 43 or more; 44 or more; 45 or more; 46 or more; 47 or more; 48 or more; 49 or more; 50 or more; 51 or more; 52 or more; 53 or more; 54 or more; 55 or more; 56 or more; 57 or more; 58 or more; 59 or more; 60 or more; 61 or more; 62 or more; 63 or more; 64 or more; 65 or more; 66 or more; 67 or more; 68 or more; 69 or more; 70 or more; 71 or more; or 72; or all of the proteins listed in Table 15.

[0193] In some embodiments, the reference sample, comprises, consists essentially of, or consists of none; 1 or more; 2 or more; 3 or more; 4 or more; 5 or more; 6 or more; 7 or more; 8 or more; 9 or more; 10 or more; 11 or more; 12 or more; 13 or more; 14 or more; 15 or more; 16 or more; 17 or more; 18 or more; 19 or more; 20 or more; 21 or more; 22 or more; 23 or more; 24 or more; 25 or more; 26 or more; 27 or more; 28 or more; 29 or more; 30 or more; 31 or more; 32 or more; 33 or more; 34 or more; 35 or more; 36 or more; 37 or more; 38 or more; 39 or more; 40 or more; 41 or more; 42 or more; 43 or more; 44 or more; 45 or more; 46 or more; 47 or more; 48 or more; 49 or more; 50 or more; 51 or more; 52 or more; 53 or more; 54 or more; 55 or more; 56 or more; 57 or more; 58 or more; 59 or more; 60 or more; 61 or more; 62 or more; 63 or more; 64 or more; 65 or more; 66 or more; 67 or more; 68 or more; 69 or more; 70 or more; 71 or more; or 72; or all of the proteins listed in Table 15.

[0194] In some embodiments, the biomarker signature is a protein biomarker signature.

[0195] In some embodiments, the mass spectrometry is selected reaction monitoring (SRM) mass spectrometry or multiple reaction monitoring (MRM) mass spectrometry. In some embodiments, the one or more peptides are correlated to the one or more proteins according to Table 5. In some embodiments, the mass spectrometry data comprises one or more Q1/Q3 mass value pairs, wherein the Q1/Q3 mass value pairs are correlated to the one or more peptides, and the one or more peptides are correlated to the one or more proteins according to Table 5.

[0196] In some embodiments, the mass spectrometry is selected reaction monitoring (SRM) mass spectrometry or multiple reaction monitoring (MRM) mass spectrometry. In some embodiments, the one or more peptides are correlated to the one or more proteins according to Table 7. In some embodiments, the mass spectrometry data comprises one or more precursor ions and one or more product ions, wherein the precursor ions and the product ions are correlated to the one or more peptides, and the one or more peptides are correlated to the one or more proteins according to Table 7.

[0197] In some embodiments, the mass spectrometry is selected reaction monitoring (SRM) mass spectrometry or multiple reaction monitoring (MRM) mass spectrometry. In some embodiments, the one or more peptides are correlated to the one or more proteins according to Table 8. In some embodiments, the mass spectrometry data comprises one or more precursor ions and one or more product ions, wherein the precursor ions and the product ions are correlated to the one or more peptides, and the one or more peptides are correlated to the one or more proteins according to Table 8.

[0198] In some embodiments, the mass spectrometry is parallel reaction monitoring (PRM) mass spectrometry. In some embodiments, the one or more peptides are correlated to the one or more proteins according to Table 9. In some embodiments, the mass spectrometry data comprises one or more precursor ions and one or more product ions, wherein the precursor ions and the product ions are correlated to the one or more peptides, and the one or more peptides are correlated to the one or more proteins according to Table 9.

[0199] In some embodiments, the mass spectrometry is parallel reaction monitoring (PRM) mass spectrometry. In some embodiments, the one or more peptides are correlated to the one or more proteins according to Table 10. In some embodiments, the mass spectrometry data comprises one or more precursor ions and one or more product ions, wherein the precursor ions and the product ions are correlated to the one or more peptides, and the one or more peptides are correlated to the one or more proteins according to Table 10.

[0200] In some embodiments, the mass spectrometry is data dependent acquisition (DDA) mass spectrometry. In some embodiments, the one or more peptides are correlated to the one or more proteins according to Table 11. In some embodiments, the mass spectrometry data comprises one or more precursor ions, wherein the precursor ions are correlated to the one or more peptides, and the one or more peptides are correlated to the one or more proteins according to Table 11.

[0201] In some embodiments, the mass spectrometry is data dependent acquisition (DDA) mass spectrometry. In some embodiments, the one or more peptides are correlated to the one or more proteins according to Table 12. In some embodiments, the mass spectrometry data comprises one or more precursor ions and one or more product ions, wherein the precursor ions and the product ions are correlated to the one or more peptides, and the one or more peptides are correlated to the one or more proteins according to Table 12.

[0202] In some embodiments, the mass spectrometry is data independent acquisition (DIA) mass spectrometry. In some embodiments, the one or more peptides are correlated to the one or more proteins according to Table 13. In some embodiments, the mass spectrometry data comprises one or more precursor ions and one or more product ions, wherein the precursor ions and the product ions are correlated to the one or more peptides, and the one or more peptides are correlated to the one or more proteins according to Table 13.

[0203] In some embodiments, the mass spectrometry is data independent acquisition (DIA) mass spectrometry. In some embodiments, the one or more peptides are correlated to the one or more proteins according to Table 14. In some embodiments, the mass spectrometry data comprises one or more precursor ions and one or more product ions, wherein the precursor ions and the product ions are correlated to the one or more peptides, and the one or more peptides are correlated to the one or more proteins according to Table 14.

[0204] In some embodiments, one or more proteases are any one or more of trypsin, chymotrypsin, endoproteinase Lys-C, endoproteinase Asp-N, pepsin, thermolysin, papain, proteinase K, subtilisin, clostripain, exopeptidase, carboxypeptidase, cathepsin C, cyanogen bromide, formic acid, hydroxylamine, or NTCB, or a combination thereof. In some embodiments, the protease is trypsin.

[0205] In some embodiments, the method further comprises adding one or more internal standards to the sample. In some embodiments, the internal standard comprises one or more stable isotope-labeled peptide standard, one or more isotopically labeled peptides, one or more isotopically labeled proteins, or any combination thereof.

[0206] Methods for Determining State of Health

[0207] In various embodiments, the present invention provides a method for assessing and/or determining the state of health of a subject, the method comprising: obtaining a sample from a subject, contacting the sample with one or more proteases so as to obtain a digested sample, wherein the digested sample comprises one or more peptides, analyzing the digested sample by mass spectrometry so as to obtain mass spectrometry data; correlating the mass spectrometry data to the one or more peptides; and correlating the one or more peptides to one or more proteins, wherein the one or more proteins are listed in the following Table:

| | UniProt | SEQ |
|---|---|---|
| Protein Name | Accession No. | ID NO: |
| Apolipoprotein L1 | O14791 | 1 |
| Ceruloplasmin | P00450 | 2 |
| Beta-galactosidase | P00722 | 3 |
| Prothrombin | P00734 | 4 |
| Complement C1r subcomponent | P00736 | 5 |
| Haptoglobin | P00738 | 6 |
| Coagulation factor X | P00742 | 7 |
| Plasminogen | P00747 | 8 |
| Coagulation factor XII | P00748 | 9 |
| Complement factor B | P00751 | 10 |
| Antithrombin-III | P01008 | 11 |
| Alpha-1-antitrypsin | P01009 | 12 |
| Alpha-1-antichymotrypsin | P01011 | 13 |
| Angiotensinogen | P01019 | 14 |
| Alpha-2-macroglobulin | P01023 | 15 |
| Complement C3 | P01024 | 16 |
| Complement C5 | P01031 | 17 |
| Ig gamma-3 chain C region | P01860 | 18 |
| Ig mu chain C region | P01871 | 19 |
| Ig alpha-1 chain C region | P01876 | 20 |
| Apolipoprotein A-I | P02647 | 21 |
| Apolipoprotein E | P02649 | 22 |
| Apolipoprotein A-II | P02652 | 23 |
| Apolipoprotein C-I | P02654 | 24 |
| Apolipoprotein C-II | P02655 | 25 |
| Apolipoprotein C-III | P02656 | 26 |
| Fibrinogen | P02671 | 27 |
| C-reactive protein | P02741 | 28 |
| Complement C1q subcomponent subunit B | P02746 | 29 |
| Complement C1q subcomponent subunit C | P02747 | 30 |
| Complement component C9 | P02748 | 31 |
| Leucine-rich alpha-2-glycoprotein | P02750 | 32 |
| Protein AMBP | P02760 | 33 |
| Alpha-1-acid glycoprotein 1 | P02763 | 34 |
| Alpha-2-HS-glycoprotein | P02765 | 35 |
| Serum albumin | P02768 | 36 |
| Vitamin D-binding protein | P02774 | 37 |
| Serotransferrin | P02787 | 38 |
| Hemopexin | P02790 | 39 |
| Plasma kallikrein | P03952 | 40 |
| C4b-binding protein alpha chain | P04003 | 41 |
| Vitronectin | P04004 | 42 |
| Apolipoprotein B-100 | P04114 | 43 |
| Alpha-1B-glycoprotein | P04217 | 44 |
| von Willebrand factor | P04275 | 45 |
| Sex hormone-binding globulin | P04278 | 46 |
| Plasma serine protease inhibitor | P05154 | 47 |
| Plasma protease C1 inhibitor | P05155 | 48 |
| Thyroxine-binding globulin | P05543 | 49 |
| Heparin cofactor 2 | P05546 | 50 |
| Gelsolin | P06396 | 51 |
| Apolipoprotein A-IV | P06727 | 52 |
| Complement component C8 alpha chain | P07357 | 53 |
| Integrin alpha-Iib | P08514 | 54 |
| Apolipoprotein(a) | P08519 | 55 |
| Complement factor H | P08603 | 56 |
| Alpha-2-antiplasmin | P08697 | 57 |
| Complement C1s subcomponent | P09871 | 58 |
| Complement C4-A | P0C0L4 | 59 |
| Complement C4-B | P0C0L5 | 60 |
| Clusterin | P10909 | 61 |
| Inter-alpha-trypsin inhibitor heavy chain H2 | P19823 | 62 |
| Inter-alpha-trypsin inhibitor heavy chain H1 | P19827 | 63 |
| Zinc-alpha-2-glycoprotein | P25311 | 64 |
| Serum paraoxonase/arylesterase 1 | P27169 | 65 |
| Peroxiredoxin-2 | P32119 | 66 |
| Serum amyloid A-4 protein | P35542 | 67 |
| Afamin | P43652 | 68 |
| Lumican | P51884 | 69 |
| Hemoglobin subunit alpha | P69905 | 70 |
| Inter-alpha-trypsin inhibitor heavy chain H4 | Q14624 | 71 |
| Serum paraoxonase/lactonase 3 | Q15166 | 72 |

and; comparing the presence or amount or level of the one or more proteins in the sample from the subject to the presence or amount or level of the one or more proteins in a reference sample so as to assess and/or determine the state of health of the subject. In some embodiments, the method further comprises measuring and/or detecting the presence or an amount or level of one or more proteins in the sample from the subject.

[0208] In some embodiments, the presence of one or more proteins in the sample from the subject relative to the reference sample is indicative of a poor state of health. In some embodiments, an increase in the amount or level of one or more proteins in the sample from the subject relative to the reference sample is indicative of a poor state of health. In some embodiments, a decrease in the amount or level of one or more proteins in the sample from the subject relative to the reference sample is indicative of a poor state of health. In some embodiments, a change in the amount or level of one or more proteins in the sample from the subject relative to the reference sample is indicative of a poor state of health. In some embodiments, the absence of one or more proteins in the sample from the subject relative to the reference sample is indicative of a good state of health. In some embodiments, the absence of one or more proteins in the sample from the subject relative to the reference sample is indicative of wellness.

[0209] In various embodiments, the present invention provides a method for assessing and/or determining the state of health of a subject; comprising: obtaining a sample from the subject; measuring and/or detecting one or more proteins in the sample by mass spectrometry so as to obtain a biomarker signature for the subject, wherein the one or more proteins are listed in Table 15; comparing the biomarker signature from the subject to one or more reference biomarker signatures; and diagnosing the subject based on the comparison, In some embodiments, the method further comprises treating the subject and/or administering a treatment and/or selecting a treatment and/or prescribing a treatment and/or providing a treatment and/or administering a preventative treatment and/or selecting a preventative treatment and/or prescribing a preventative treatment and/or providing a preventative treatment. In some embodiments, the one or more reference biomarker signatures are from one or more subjects having one or more diseases. In some embodiments, the one or more reference biomarker signatures are from one or more healthy subjects. In some embodiments, the subject is diagnosed with the disease if the comparison of the biomarker signature from the subject to one or more reference biomarker signatures shows a change or difference in the biomarker signature from the subject relative to one or more reference biomarker signatures. In some embodiments, the subject is diagnosed with the disease if the comparison of the biomarker signature from the subject to one or more reference biomarker signatures does not show a change or difference in the biomarker signature from the subject relative to one or more reference biomarker signatures. In some embodiments, the detecting one or more proteins in the sample by mass spectrometry comprises analyzing the digested sample by mass spectrometry so as to obtain mass spectrometry data; correlating the mass spectrometry data to the one or more peptides; and correlating the one or more peptides to one or more proteins, wherein the one or more proteins are listed in Table 15. In some embodiments, the digested sample is obtained by contacting the sample with one or more proteases so as to obtain a digested sample, wherein the digested sample comprises one or more peptides.

[0210] In some embodiments, the mass spectrometry is selected reaction monitoring (SRM) mass spectrometry or multiple reaction monitoring (MRM) mass spectrometry. In some embodiments, the one or more peptides are correlated to the one or more proteins according to Table 5. In some embodiments, the mass spectrometry data comprises one or more Q1/Q3 mass value pairs, wherein the Q1/Q3 mass value pairs are correlated to the one or more peptides, and the one or more peptides are correlated to the one or more proteins according to Table 5.

[0211] In some embodiments, the mass spectrometry is selected reaction monitoring (SRM) mass spectrometry or multiple reaction monitoring (MRM) mass spectrometry. In some embodiments, the one or more peptides are correlated to the one or more proteins according to Table 7. In some embodiments, the mass spectrometry data comprises one or more precursor ions and one or more product ions, wherein the precursor ions and the product ions are correlated to the one or more peptides, and the one or more peptides are correlated to the one or more proteins according to Table 7.

[0212] In some embodiments, the mass spectrometry is selected reaction monitoring (SRM) mass spectrometry or multiple reaction monitoring (MRM) mass spectrometry. In some embodiments, the one or more peptides are correlated to the one or more proteins according to Table 8. In some embodiments, the mass spectrometry data comprises one or more precursor ions and one or more product ions, wherein the precursor ions and the product ions are correlated to the one or more peptides, and the one or more peptides are correlated to the one or more proteins according to Table 8.

[0213] In some embodiments, the mass spectrometry is parallel reaction monitoring (PRM) mass spectrometry. In some embodiments, the one or more peptides are correlated to the one or more proteins according to Table 9. In some embodiments, the mass spectrometry data comprises one or more precursor ions and one or more product ions, wherein the precursor ions and the product ions are correlated to the one or more peptides, and the one or more peptides are correlated to the one or more proteins according to Table 9.

[0214] In some embodiments, the mass spectrometry is parallel reaction monitoring (PRM) mass spectrometry. In some embodiments, the one or more peptides are correlated to the one or more proteins according to Table 10. In some embodiments, the mass spectrometry data comprises one or more precursor ions and one or more product ions, wherein the precursor ions and the product ions are correlated to the one or more peptides, and the one or more peptides are correlated to the one or more proteins according to Table 10.

[0215] In some embodiments, the mass spectrometry is data dependent acquisition (DDA) mass spectrometry. In some embodiments, the one or more peptides are correlated to the one or more proteins according to Table 11. In some embodiments, the mass spectrometry data comprises one or more precursor ions, wherein the precursor ions are correlated to the one or more peptides, and the one or more peptides are correlated to the one or more proteins according to Table 11.

[0216] In some embodiments, the mass spectrometry is data dependent acquisition (DDA) mass spectrometry. In some embodiments, the one or more peptides are correlated to the one or more proteins according to Table 12. In some embodiments, the mass spectrometry data comprises one or more precursor ions and one or more product ions, wherein the precursor ions and the product ions are correlated to the one or more peptides, and the one or more peptides are correlated to the one or more proteins according to Table 12.

[0217] In some embodiments, the mass spectrometry is data independent acquisition (DIA) mass spectrometry. In some embodiments, the one or more peptides are correlated to the one or more proteins according to Table 13. In some embodiments, the mass spectrometry data comprises one or more precursor ions and one or more product ions, wherein the precursor ions and the product ions are correlated to the one or more peptides, and the one or more peptides are correlated to the one or more proteins according to Table 13.

[0218] In some embodiments, the mass spectrometry is data independent acquisition (DIA) mass spectrometry. In some embodiments, the one or more peptides are correlated to the one or more proteins according to Table 14. In some embodiments, the mass spectrometry data comprises one or more precursor ions and one or more product ions, wherein the precursor ions and the product ions are correlated to the one or more peptides, and the one or more peptides are correlated to the one or more proteins according to Table 14.

[0219] In some embodiments, one or more proteases are any one or more of trypsin, chymotrypsin, endoproteinase Lys-C, endoproteinase Asp-N, pepsin, thermolysin, papain, proteinase K, subtilisin, clostripain, exopeptidase, carboxypeptidase, cathepsin C, cyanogen bromide, formic acid, hydroxylamine, or NTCB, or a combination thereof. In some embodiments, the protease is trypsin.

[0220] In some embodiments, the method further comprises adding one or more internal standards to the sample. In some embodiments, the internal standard comprises one or more stable isotope-labeled peptide standard, one or more isotopically labeled peptides, one or more isotopically labeled proteins, or any combination thereof.

[0221] Prognostic Methods

[0222] In various embodiments, the present invention provides a method for determining the prognosis of a subject, the method comprising: obtaining a sample from a subject, contacting the sample with one or more proteases so as to obtain a digested sample, wherein the digested sample comprises one or more peptides, analyzing the digested sample by mass spectrometry so as to obtain mass spectrometry data, correlating the mass spectrometry data to the one or more peptides; and correlating the one or more peptides to one or more proteins, wherein the one or more proteins are listed in the following Table:

| | UniProt | SEQ |
|---|---|---|
| Protein Name | Accession No. | ID NO: |
| Apolipoprotein L1 | O14791 | 1 |
| Ceruloplasmin | P00450 | 2 |
| Beta-galactosidase | P00722 | 3 |
| Prothrombin | P00734 | 4 |
| Complement C1r subcomponent | P00736 | 5 |
| Haptoglobin | P00738 | 6 |
| Coagulation factor X | P00742 | 7 |
| Plasminogen | P00747 | 8 |
| Coagulation factor XII | P00748 | 9 |
| Complement factor B | P00751 | 10 |
| Antithrombin-III | P01008 | 11 |
| Alpha-1-antitrypsin | P01009 | 12 |
| Alpha-1-antichymotrypsin | P01011 | 13 |
| Angiotensinogen | P01019 | 14 |
| Alpha-2-macroglobulin | P01023 | 15 |
| Complement C3 | P01024 | 16 |
| Complement C5 | P01031 | 17 |
| Ig gamma-3 chain C region | P01860 | 18 |
| Ig mu chain C region | P01871 | 19 |
| Ig alpha-1 chain C region | P01876 | 20 |
| Apolipoprotein A-I | P02647 | 21 |
| Apolipoprotein E | P02649 | 22 |
| Apolipoprotein A-II | P02652 | 23 |
| Apolipoprotein C-I | P02654 | 24 |
| Apolipoprotein C-II | P02655 | 25 |
| Apolipoprotein C-III | P02656 | 26 |
| Fibrinogen | P02671 | 27 |
| C-reactive protein | P02741 | 28 |
| Complement C1q subcomponent subunit B | P02746 | 29 |
| Complement C1q subcomponent subunit C | P02747 | 30 |
| Complement component C9 | P02748 | 31 |
| Leucine-rich alpha-2-glycoprotein | P02750 | 32 |
| Protein AMBP | P02760 | 33 |
| Alpha-1-acid glycoprotein 1 | P02763 | 34 |
| Alpha-2-HS-glycoprotein | P02765 | 35 |
| Serum albumin | P02768 | 36 |
| Vitamin D-binding protein | P02774 | 37 |
| Serotransferrin | P02787 | 38 |
| Hemopexin | P02790 | 39 |
| Plasma kallikrein | P03952 | 40 |
| C4b-binding protein alpha chain | P04003 | 41 |
| Vitronectin | P04004 | 42 |
| Apolipoprotein B-100 | P04114 | 43 |
| Alpha-1B-glycoprotein | P04217 | 44 |
| von Willebrand factor | P04275 | 45 |
| Sex hormone-binding globulin | P04278 | 46 |
| Plasma serine protease inhibitor | P05154 | 47 |
| Plasma protease C1 inhibitor | P05155 | 48 |
| Thyroxine-binding globulin | P05543 | 49 |
| Heparin cofactor 2 | P05546 | 50 |
| Gelsolin | P06396 | 51 |
| Apolipoprotein A-IV | P06727 | 52 |
| Complement component C8 alpha chain | P07357 | 53 |
| Integrin alpha-Iib | P08514 | 54 |
| Apolipoprotein(a) | P08519 | 55 |
| Complement factor H | P08603 | 56 |
| Alpha-2-antiplasmin | P08697 | 57 |
| Complement C1s subcomponent | P09871 | 58 |
| Complement C4-A | P0C0L4 | 59 |
| Complement C4-B | P0C0L5 | 60 |
| Clusterin | P10909 | 61 |
| Inter-alpha-trypsin inhibitor heavy chain H2 | P19823 | 62 |
| Inter-alpha-trypsin inhibitor heavy chain H1 | P19827 | 63 |
| Zinc-alpha-2-glycoprotein | P25311 | 64 |
| Serum paraoxonase/arylesterase 1 | P27169 | 65 |
| Peroxiredoxin-2 | P32119 | 66 |
| Serum amyloid A-4 protein | P35542 | 67 |
| Afamin | P43652 | 68 |
| Lumican | P51884 | 69 |
| Hemoglobin subunit alpha | P69905 | 70 |
| Inter-alpha-trypsin inhibitor heavy chain H4 | Q14624 | 71 |
| Serum paraoxonase/lactonase 3 | Q15166 | 72 |

and; comparing the presence or amount or level of the one or more proteins in the sample from the subject to the presence or amount or level of the one or more proteins in a reference sample so as to determine the prognosis of the subject. In some embodiments, the method further comprises measuring and/or detecting the presence or an amount or level of one or more proteins in the sample from the subject.

[0223] In some embodiments, the presence of one or more proteins in the sample from the subject relative to the reference sample is indicative of a poor prognosis. In some embodiments, an increase in the amount or level of one or more proteins in the sample from the subject relative to the reference sample is indicative of a poor prognosis. In some embodiments, a decrease in the amount or level of one or more proteins in the sample from the subject relative to the reference sample is indicative of a poor prognosis. In some embodiments, a change in the amount or level of one or more proteins in the sample from the subject relative to the reference sample is indicative of a poor prognosis. In some embodiments, the absence of one or more proteins in the sample from the subject relative to the reference sample is indicative of a good prognosis.

[0224] In some embodiments, the method further comprises treating the subject and/or selecting a treatment for and/or providing a treatment to the subject based on the prognosis.

[0225] In various embodiments, the present invention provides a method for determining the prognosis of a subject, comprising: obtaining a sample from a subject; contacting the sample with one or more proteases so as to obtain a digested sample, wherein the digested sample comprises one or more peptides; analyzing the digested sample by mass spectrometry so as to obtain mass spectrometry data; correlating the mass spectrometry data to the one or more peptides; and correlating the one or more peptides to one or more proteins so as to obtain a protein biomarker signature for the subject, wherein the one or more proteins are listed in Table 15; and comparing the protein biomarker signature from the subject to one or more reference protein biomarker signatures so as to obtain the prognosis of the subject. In some embodiments, a change in the protein biomarker signature from the subject relative to one or more reference biomarker signatures is indicative of a poor prognosis. In some embodiments, the reference protein biomarker signature is obtained from a control subject, wherein the control subject does not have the disease. In some embodiments, the reference protein biomarker signature is obtained from the subject before the subject is treated for the disease. In some embodiments, the reference protein biomarker signature is from a subject that has been successfully treated for the disease. In some embodiments, the method further comprises treating the subject and/or selecting a treatment for and/or providing a treatment to the subject based on the prognosis.

[0226] In some embodiments, the mass spectrometry is selected reaction monitoring (SRM) mass spectrometry or multiple reaction monitoring (MRM) mass spectrometry. In some embodiments, the one or more peptides are correlated to the one or more proteins according to Table 5. In some embodiments, the mass spectrometry data comprises one or more Q1/Q3 mass value pairs, wherein the Q1/Q3 mass value pairs are correlated to the one or more peptides, and the one or more peptides are correlated to the one or more proteins according to Table 5.

[0227] In some embodiments, the mass spectrometry is selected reaction monitoring (SRM) mass spectrometry or multiple reaction monitoring (MRM) mass spectrometry. In some embodiments, the one or more peptides are correlated to the one or more proteins according to Table 7. In some embodiments, the mass spectrometry data comprises one or more precursor ions and one or more product ions, wherein the precursor ions and the product ions are correlated to the one or more peptides, and the one or more peptides are correlated to the one or more proteins according to Table 7.

[0228] In some embodiments, the mass spectrometry is selected reaction monitoring (SRM) mass spectrometry or multiple reaction monitoring (MRM) mass spectrometry. In some embodiments, the one or more peptides are correlated to the one or more proteins according to Table 8. In some embodiments, the mass spectrometry data comprises one or more precursor ions and one or more product ions, wherein the precursor ions and the product ions are correlated to the one or more peptides, and the one or more peptides are correlated to the one or more proteins according to Table 8.

[0229] In some embodiments, the mass spectrometry is parallel reaction monitoring (PRM) mass spectrometry. In some embodiments, the one or more peptides are correlated to the one or more proteins according to Table 9. In some embodiments, the mass spectrometry data comprises one or more precursor ions and one or more product ions, wherein the precursor ions and the product ions are correlated to the one or more peptides, and the one or more peptides are correlated to the one or more proteins according to Table 9.

[0230] In some embodiments, the mass spectrometry is parallel reaction monitoring (PRM) mass spectrometry. In some embodiments, the one or more peptides are correlated to the one or more proteins according to Table 10. In some embodiments, the mass spectrometry data comprises one or more precursor ions and one or more product ions, wherein the precursor ions and the product ions are correlated to the one or more peptides, and the one or more peptides are correlated to the one or more proteins according to Table 10.

[0231] In some embodiments, the mass spectrometry is data dependent acquisition (DDA) mass spectrometry. In some embodiments, the one or more peptides are correlated to the one or more proteins according to Table 11. In some embodiments, the mass spectrometry data comprises one or more precursor ions, wherein the precursor ions are correlated to the one or more peptides, and the one or more peptides are correlated to the one or more proteins according to Table 11.

[0232] In some embodiments, the mass spectrometry is data dependent acquisition (DDA) mass spectrometry. In some embodiments, the one or more peptides are correlated to the one or more proteins according to Table 12. In some embodiments, the mass spectrometry data comprises one or more precursor ions and one or more product ions, wherein the precursor ions and the product ions are correlated to the one or more peptides, and the one or more peptides are correlated to the one or more proteins according to Table 12.

[0233] In some embodiments, the mass spectrometry is data independent acquisition (DIA) mass spectrometry. In some embodiments, the one or more peptides are correlated to the one or more proteins according to Table 13. In some embodiments, the mass spectrometry data comprises one or more precursor ions and one or more product ions, wherein the precursor ions and the product ions are correlated to the one or more peptides, and the one or more peptides are correlated to the one or more proteins according to Table 13.

[0234] In some embodiments, the mass spectrometry is data independent acquisition (DIA) mass spectrometry. In some embodiments, the one or more peptides are correlated to the one or more proteins according to Table 14. In some embodiments, the mass spectrometry data comprises one or more precursor ions and one or more product ions, wherein the precursor ions and the product ions are correlated to the one or more peptides, and the one or more peptides are correlated to the one or more proteins according to Table 14.

[0235] In some embodiments, one or more proteases are any one or more of trypsin, chymotrypsin, endoproteinase Lys-C, endoproteinase Asp-N, pepsin, thermolysin, papain, proteinase K, subtilisin, clostripain, exopeptidase, carboxypeptidase, cathepsin C, cyanogen bromide, formic acid, hydroxylamine, or NTCB, or a combination thereof. In some embodiments, the protease is trypsin.

[0236] In some embodiments, the method further comprises adding one or more internal standards to the sample. In some embodiments, the internal standard comprises one or more stable isotope-labeled peptide standard, one or more isotopically labeled peptides, one or more isotopically labeled proteins, or any combination thereof.

[0237] Diagnostic Methods

[0238] In various embodiments, the present invention provides a method for diagnosing a disease in a subject, comprising: obtaining a sample from a subject; contacting the sample with one or more proteases so as to obtain a digested sample, wherein the digested sample comprises one or more peptides; analyzing the digested sample by mass spectrometry so as to obtain mass spectrometry data; correlating the mass spectrometry data to the one or more peptides; and correlating the one or more peptides to one or more proteins so as to obtain a protein biomarker signature for the subject, wherein the one or more proteins are listed in the following Table:

| | UniProt | SEQ |
|---|---|---|
| Protein Name | Accession No. | ID NO: |
| Apolipoprotein L1 | O14791 | 1 |
| Ceruloplasmin | P00450 | 2 |
| Beta-galactosidase | P00722 | 3 |
| Prothrombin | P00734 | 4 |
| Complement C1r subcomponent | P00736 | 5 |
| Haptoglobin | P00738 | 6 |
| Coagulation factor X | P00742 | 7 |
| Plasminogen | P00747 | 8 |
| Coagulation factor XII | P00748 | 9 |
| Complement factor B | P00751 | 10 |
| Antithrombin-III | P01008 | 11 |
| Alpha-1-antitrypsin | P01009 | 12 |
| Alpha-1-antichymotrypsin | P01011 | 13 |
| Angiotensinogen | P01019 | 14 |
| Alpha-2-macroglobulin | P01023 | 15 |
| Complement C3 | P01024 | 16 |
| Complement C5 | P01031 | 17 |
| Ig gamma-3 chain C region | P01860 | 18 |
| Ig mu chain C region | P01871 | 19 |
| Ig alpha-1 chain C region | P01876 | 20 |
| Apolipoprotein A-I | P02647 | 21 |
| Apolipoprotein E | P02649 | 22 |
| Apolipoprotein A-II | P02652 | 23 |
| Apolipoprotein C-I | P02654 | 24 |
| Apolipoprotein C-II | P02655 | 25 |
| Apolipoprotein C-III | P02656 | 26 |
| Fibrinogen | P02671 | 27 |
| C-reactive protein | P02741 | 28 |
| Complement C1q subcomponent subunit B | P02746 | 29 |
| Complement C1q subcomponent subunit C | P02747 | 30 |
| Complement component C9 | P02748 | 31 |
| Leucine-rich alpha-2-glycoprotein | P02750 | 32 |
| Protein AMBP | P02760 | 33 |
| Alpha-1-acid glycoprotein 1 | P02763 | 34 |
| Alpha-2-HS-glycoprotein | P02765 | 35 |
| Serum albumin | P02768 | 36 |
| Vitamin D-binding protein | P02774 | 37 |
| Serotransferrin | P02787 | 38 |
| Hemopexin | P02790 | 39 |
| Plasma kallikrein | P03952 | 40 |
| C4b-binding protein alpha chain | P04003 | 41 |
| Vitronectin | P04004 | 42 |
| Apolipoprotein B-100 | P04114 | 43 |
| Alpha-1B-glycoprotein | P04217 | 44 |
| von Willebrand factor | P04275 | 45 |
| Sex hormone-binding globulin | P04278 | 46 |
| Plasma serine protease inhibitor | P05154 | 47 |
| Plasma protease C1 inhibitor | P05155 | 48 |
| Thyroxine-binding globulin | P05543 | 49 |
| Heparin cofactor 2 | P05546 | 50 |
| Gelsolin | P06396 | 51 |
| Apolipoprotein A-IV | P06727 | 52 |
| Complement component C8 alpha chain | P07357 | 53 |
| Integrin alpha-Iib | P08514 | 54 |
| Apolipoprotein(a) | P08519 | 55 |
| Complement factor H | P08603 | 56 |
| Alpha-2-antiplasmin | P08697 | 57 |
| Complement C1s subcomponent | P09871 | 58 |
| Complement C4-A | P0C0L4 | 59 |
| Complement C4-B | P0C0L5 | 60 |
| Clusterin | P10909 | 61 |
| Inter-alpha-trypsin inhibitor heavy chain H2 | P19823 | 62 |
| Inter-alpha-trypsin inhibitor heavy chain H1 | P19827 | 63 |
| Zinc-alpha-2-glycoprotein | P25311 | 64 |
| Serum paraoxonase/arylesterase 1 | P27169 | 65 |
| Peroxiredoxin-2 | P32119 | 66 |
| Serum amyloid A-4 protein | P35542 | 67 |
| Afamin | P43652 | 68 |
| Lumican | P51884 | 69 |
| Hemoglobin subunit alpha | P69905 | 70 |
| Inter-alpha-trypsin inhibitor heavy chain H4 | Q14624 | 71 |
| Serum paraoxonase/lactonase 3 | Q15166 | 72 |

and; comparing the protein biomarker signature from the subject to one or more reference protein biomarker signatures, wherein a change in the protein biomarker signature from the subject relative to one or more reference biomarker signatures is indicative of the disease in the subject.

[0239] In some embodiments, the reference protein biomarker signature is obtained from a control subject, wherein the control subject does not have the disease. In some embodiments, the reference protein biomarker signature is obtained from the subject before the subject is treated for the disease. In some embodiments, the reference protein biomarker signature is from a subject that has been successfully treated for the disease.

[0240] In some embodiments, the method further comprises treating the subject and/or selecting a treatment for and/or providing a treatment to the subject based on the diagnosis.

[0241] In various embodiments, the present invention provides a method for assessing the efficacy of the treatment, comprising: comparing the protein biomarker signature from the subject to one or more reference protein biomarker signatures, wherein a change in the protein biomarker signature from the subject relative to one or more reference protein biomarker signatures is indicative of the efficacy of the treatment.

[0242] In some embodiments, the method further comprises determining that the subject does not have the disease; and selecting and/or providing a preventative treatment for the subject.

[0243] In some embodiments, the method further comprises determining that the subject has the disease; and treating the subject and/or selecting a treatment for and/or providing a treatment for the subject and/or prescribing a treatment for the subject and/or administering a treatment to the subject.

[0244] In various embodiments, the present invention provides a method for diagnosing a disease in a subject; comprising: obtaining a sample from the subject; measuring and/or detecting one or more proteins in the sample by mass spectrometry so as to obtain a biomarker signature for the subject, wherein the one or more proteins are listed in Table 15; comparing the biomarker signature from the subject to one or more reference biomarker signatures; and diagnosing the subject based on the comparison, In some embodiments, the method further comprises treating the subject and/or administering a treatment and/or selecting a treatment and/or prescribing a treatment and/or providing a treatment and/or administering a preventative treatment and/or selecting a preventative treatment and/or prescribing a preventative treatment and/or providing a preventative treatment. In some embodiments, the one or more reference biomarker signatures are from one or more subjects having one or more diseases. In some embodiments, the one or more reference biomarker signatures are from one or more healthy subjects. In some embodiments, the subject is diagnosed with the disease if the comparison of the biomarker signature from the subject to one or more reference biomarker signatures shows a change or difference in the biomarker signature from the subject relative to one or more reference biomarker signatures. In some embodiments, the subject is diagnosed with the disease if the comparison of the biomarker signature from the subject to one or more reference biomarker signatures does not show a change or difference in the biomarker signature from the subject relative to one or more reference biomarker signatures.

[0245] In various embodiments, the present invention provides a method for diagnosing a disease in a subject, comprising: obtaining a sample from the subject; contacting the sample with one or more proteases so as to obtain a digested sample, wherein the digested sample comprises one or more peptides; analyzing the digested sample by mass spectrometry so as to obtain mass spectrometry data; correlating the mass spectrometry data to the one or more peptides; correlating the one or more peptides to one or more proteins, wherein the one or more proteins are listed in Table 15; comparing an amount or level of the one or more proteins in the sample from the subject to an amount or level of the one or more proteins in a reference sample; wherein an increase in the amount or level of the one or more proteins in the sample from the subject relative to the amount or level of the one or more proteins from the reference sample is indicative of and/or a diagnosis of the disease in the subject. In some embodiments, the method further comprises measuring and/or detecting an amount or level of one or more proteins in the sample from the subject. In some embodiments, the method further comprises selecting or prescribing a treatment for the subject based on the diagnosis. In some embodiments, the method further comprises treating the subject based on the diagnosis. In some embodiments, the method further comprises administering a treatment to the subject based on the diagnosis. In some embodiments, the method further comprises providing a treatment to the subject based on the diagnosis. In some embodiments, the method further comprises referring the subject to a specialist based on the diagnosis. In some embodiments, the sample is obtained before, during, or after treatment for the disease. In some embodiments the reference sample is obtained from a control subject, wherein the control subject does not have the disease. In some embodiments, the reference sample is obtained from a subject that has been successfully treated for the disease. In some embodiments, the reference sample is a sample obtained from the subject at an earlier point in time. In some embodiments, the reference sample is obtained from the subject before the subject is treated for the disease. In some embodiments, the proteins in the reference sample are one or more proteins in Table 15.

[0246] In various embodiments, the present invention provides a method for diagnosing a disease in a subject; comprising: obtaining a sample from the subject; contacting the sample with one or more proteases so as to obtain a digested sample, wherein the digested sample comprises one or more peptides; analyzing the digested sample by mass spectrometry so as to obtain mass spectrometry data; correlating the mass spectrometry data to the one or more peptides; correlating the one or more peptides to one or more proteins, wherein the one or more proteins are listed in Table 15; comparing an amount or level of the one or more proteins in the sample from the subject to an amount or level of the one or more proteins in a reference sample; wherein a decrease in the amount or level of the one or more proteins in the sample from the subject relative to the amount or level of the one or more proteins from the reference sample is indicative of and/or a diagnosis of the disease in the subject. In some embodiments, the method further comprises measuring and/or detecting an amount or level of one or more proteins in the sample from the subject. In some embodiments, the method further comprises selecting or prescribing a treatment for the subject based on the diagnosis. In some embodiments, the method further comprises treating the subject based on the diagnosis. In some embodiments, the method further comprises administering a treatment to the subject based on the diagnosis. In some embodiments, the method further comprises providing a treatment to the subject based on the diagnosis. In some embodiments, the method further comprises referring the subject to a specialist based on the diagnosis. In some embodiments, the sample is obtained before, during, or after treatment for the disease. In some embodiments the reference sample is obtained from a control subject, wherein the control subject does not have the disease. In some embodiments, the reference sample is obtained from a subject that has been successfully treated for the disease. In some embodiments, the reference sample is a sample obtained from the subject at an earlier point in time. In some embodiments, the reference sample is obtained from the subject before the subject is treated for the disease. In some embodiments, the proteins in the reference sample are one or more proteins in Table 15.

[0247] In various embodiments, the present invention provides a method for diagnosing a disease in a subject; comprising: obtaining a sample from the subject; contacting the sample with one or more proteases so as to obtain a digested sample, wherein the digested sample comprises one or more peptides; analyzing the digested sample by mass spectrometry so as to obtain mass spectrometry data; correlating the mass spectrometry data to the one or more peptides; correlating the one or more peptides to one or more proteins, wherein the one or more proteins are listed in Table 15; and comparing an amount or level of the one or more proteins in the sample from the subject to an amount or level of the one or more proteins in a reference sample, wherein a change in the amount or level of the one or more proteins in the sample from the subject relative to the amount or level of the one or more proteins from the reference sample is indicative of and/or a diagnosis of the disease in the subject. In some embodiments, the method further comprises measuring and/or detecting an amount or level of one or more proteins in the sample from the subject. In some embodiments, the method further comprises selecting or prescribing a treatment for the subject based on the diagnosis. In some embodiments, the method further comprises treating the subject based on the diagnosis. In some embodiments, the method further comprises administering a treatment to the subject based on the diagnosis. In some embodiments, the method further comprises providing a treatment to the subject based on the diagnosis. In some embodiments, the method further comprises referring the subject to a specialist based on the diagnosis. In some embodiments, the sample is obtained before, during, or after treatment for the disease. In some embodiments the reference sample is obtained from a control subject, wherein the control subject does not have the disease. In some embodiments, the reference sample is obtained from a subject that has been successfully treated for the disease. In some embodiments, the reference sample is a sample obtained from the subject at an earlier point in time. In some embodiments, the reference sample is obtained from the subject before the subject is treated for the disease. In some embodiments, the proteins in the reference sample are one or more proteins in Table 15.

[0248] In various embodiments, the present invention provides a method for diagnosing a disease in a subject; comprising: obtaining a sample from the subject; contacting the sample with one or more proteases so as to obtain a digested sample, wherein the digested sample comprises one or more peptides; analyzing the digested sample by mass spectrometry so as to obtain mass spectrometry data; correlating the mass spectrometry data to the one or more peptides; correlating the one or more peptides to one or more proteins, wherein the one or more proteins are listed in Table 15; and detecting a presence of the one or more proteins in the sample from the subject, wherein the presence of the one or more proteins in the sample from the subject relative to a reference sample is indicative of and/or a diagnosis of the disease in the subject. In some embodiments, the method further comprises selecting or prescribing a treatment for the subject based on the diagnosis. In some embodiments, the method further comprises treating the subject based on the diagnosis. In some embodiments, the method further comprises administering a treatment to the subject based on the diagnosis. In some embodiments, the method further comprises providing a treatment to the subject based on the diagnosis. In some embodiments, the method further comprises referring the subject to a specialist based on the diagnosis. In some embodiments, the sample is obtained before, during, or after treatment for the disease. In some embodiments the reference sample is obtained from a control subject, wherein the control subject does not have the disease. In some embodiments, the reference sample is obtained from a subject that has been successfully treated for the disease. In some embodiments, the reference sample is a sample obtained from the subject at an earlier point in time. In some embodiments, the reference sample is obtained from the subject before the subject is treated for the disease.

[0249] In some embodiments, the mass spectrometry is selected reaction monitoring (SRM) mass spectrometry or multiple reaction monitoring (MRM) mass spectrometry. In some embodiments, the one or more peptides are correlated to the one or more proteins according to Table 5. In some embodiments, the mass spectrometry data comprises one or more Q1/Q3 mass value pairs, wherein the Q1/Q3 mass value pairs are correlated to the one or more peptides, and the one or more peptides are correlated to the one or more proteins according to Table 5.

[0250] In some embodiments, the mass spectrometry is selected reaction monitoring (SRM) mass spectrometry or multiple reaction monitoring (MRM) mass spectrometry. In some embodiments, the one or more peptides are correlated to the one or more proteins according to Table 7. In some embodiments, the mass spectrometry data comprises one or more precursor ions and one or more product ions, wherein the precursor ions and the product ions are correlated to the one or more peptides, and the one or more peptides are correlated to the one or more proteins according to Table 7.

[0251] In some embodiments, the mass spectrometry is selected reaction monitoring (SRM) mass spectrometry or multiple reaction monitoring (MRM) mass spectrometry. In some embodiments, the one or more peptides are correlated to the one or more proteins according to Table 8. In some embodiments, the mass spectrometry data comprises one or more precursor ions and one or more product ions, wherein the precursor ions and the product ions are correlated to the one or more peptides, and the one or more peptides are correlated to the one or more proteins according to Table 8.

[0252] In some embodiments, the mass spectrometry is parallel reaction monitoring (PRM) mass spectrometry. In some embodiments, the one or more peptides are correlated to the one or more proteins according to Table 9. In some embodiments, the mass spectrometry data comprises one or more precursor ions and one or more product ions, wherein the precursor ions and the product ions are correlated to the one or more peptides, and the one or more peptides are correlated to the one or more proteins according to Table 9.

[0253] In some embodiments, the mass spectrometry is parallel reaction monitoring (PRM) mass spectrometry. In some embodiments, the one or more peptides are correlated to the one or more proteins according to Table 10. In some embodiments, the mass spectrometry data comprises one or more precursor ions and one or more product ions, wherein the precursor ions and the product ions are correlated to the one or more peptides, and the one or more peptides are correlated to the one or more proteins according to Table 10.

[0254] In some embodiments, the mass spectrometry is data dependent acquisition (DDA) mass spectrometry. In some embodiments, the one or more peptides are correlated to the one or more proteins according to Table 11. In some embodiments, the mass spectrometry data comprises one or more precursor ions, wherein the precursor ions are correlated to the one or more peptides, and the one or more peptides are correlated to the one or more proteins according to Table 11.

[0255] In some embodiments, the mass spectrometry is data dependent acquisition (DDA) mass spectrometry. In some embodiments, the one or more peptides are correlated to the one or more proteins according to Table 12. In some embodiments, the mass spectrometry data comprises one or more precursor ions and one or more product ions, wherein the precursor ions and the product ions are correlated to the one or more peptides, and the one or more peptides are correlated to the one or more proteins according to Table 12.

[0256] In some embodiments, the mass spectrometry is data independent acquisition (DIA) mass spectrometry. In some embodiments, the one or more peptides are correlated to the one or more proteins according to Table 13. In some embodiments, the mass spectrometry data comprises one or more precursor ions and one or more product ions, wherein the precursor ions and the product ions are correlated to the one or more peptides, and the one or more peptides are correlated to the one or more proteins according to Table 13.

[0257] In some embodiments, the mass spectrometry is data independent acquisition (DIA) mass spectrometry. In some embodiments, the one or more peptides are correlated to the one or more proteins according to Table 14. In some embodiments, the mass spectrometry data comprises one or more precursor ions and one or more product ions, wherein the precursor ions and the product ions are correlated to the one or more peptides, and the one or more peptides are correlated to the one or more proteins according to Table 14.

[0258] In some embodiments, one or more proteases are any one or more of trypsin, chymotrypsin, endoproteinase Lys-C, endoproteinase Asp-N, pepsin, thermolysin, papain, proteinase K, subtilisin, clostripain, exopeptidase, carboxypeptidase, cathepsin C, cyanogen bromide, formic acid, hydroxylamine, or NTCB, or a combination thereof. In some embodiments, the protease is trypsin.

[0259] In some embodiments, the method further comprises adding one or more internal standards to the sample. In some embodiments, the internal standard comprises one or more stable isotope-labeled peptide standard, one or more isotopically labeled peptides, one or more isotopically labeled proteins, or any combination thereof.

[0260] Treatment Methods

[0261] In various embodiments, the present invention provides a method for treating, inhibiting, and/or reducing the severity of a disease in a subject, comprising: selecting a subject diagnosed with one or more diseases by the methods described herein and administering to the subject a treatment so as to treat, inhibit, and/or reduce the severity of the disease.

[0262] In various embodiments, the present invention provides a method of treating, inhibiting, and/or reducing the severity of a disease in a subject, comprising: obtaining a sample from the subject; contacting the sample with one or more proteases so as to obtain a digested sample, wherein the digested sample comprises one or more peptides; analyzing the digested sample by mass spectrometry so as to obtain mass spectrometry data; correlating the mass spectrometry data to the one or more peptides; correlating the one or more peptides to one or more proteins so as to obtain a protein biomarker signature for the subject, wherein the one or more proteins are listed in the following Table:

| | UniProt | SEQ |
|---|---|---|
| Protein Name | Accession No. | ID NO: |
| Apolipoprotein L1 | O14791 | 1 |
| Ceruloplasmin | P00450 | 2 |
| Beta-galactosidase | P00722 | 3 |
| Prothrombin | P00734 | 4 |
| Complement C1r subcomponent | P00736 | 5 |
| Haptoglobin | P00738 | 6 |
| Coagulation factor X | P00742 | 7 |
| Plasminogen | P00747 | 8 |
| Coagulation factor XII | P00748 | 9 |
| Complement factor B | P00751 | 10 |
| Antithrombin-III | P01008 | 11 |
| Alpha-1-antitrypsin | P01009 | 12 |
| Alpha-1-antichymotrypsin | P01011 | 13 |
| Angiotensinogen | P01019 | 14 |
| Alpha-2-macroglobulin | P01023 | 15 |
| Complement C3 | P01024 | 16 |
| Complement C5 | P01031 | 17 |
| Ig gamma-3 chain C region | P01860 | 18 |
| Ig mu chain C region | P01871 | 19 |
| Ig alpha-1 chain C region | P01876 | 20 |
| Apolipoprotein A-I | P02647 | 21 |
| Apolipoprotein E | P02649 | 22 |
| Apolipoprotein A-II | P02652 | 23 |
| Apolipoprotein C-I | P02654 | 24 |
| Apolipoprotein C-II | P02655 | 25 |
| Apolipoprotein C-III | P02656 | 26 |
| Fibrinogen | P02671 | 27 |
| C-reactive protein | P02741 | 28 |
| Complement C1q subcomponent subunit B | P02746 | 29 |
| Complement C1q subcomponent subunit C | P02747 | 30 |
| Complement component C9 | P02748 | 31 |
| Leucine-rich alpha-2-glycoprotein | P02750 | 32 |
| Protein AMBP | P02760 | 33 |
| Alpha-1-acid glycoprotein 1 | P02763 | 34 |
| Alpha-2-HS-glycoprotein | P02765 | 35 |
| Serum albumin | P02768 | 36 |
| Vitamin D-binding protein | P02774 | 37 |
| Serotransferrin | P02787 | 38 |
| Hemopexin | P02790 | 39 |
| Plasma kallikrein | P03952 | 40 |
| C4b-binding protein alpha chain | P04003 | 41 |
| Vitronectin | P04004 | 42 |
| Apolipoprotein B-100 | P04114 | 43 |
| Alpha-1B-glycoprotein | P04217 | 44 |
| von Willebrand factor | P04275 | 45 |
| Sex hormone-binding globulin | P04278 | 46 |
| Plasma serine protease inhibitor | P05154 | 47 |
| Plasma protease C1 inhibitor | P05155 | 48 |
| Thyroxine-binding globulin | P05543 | 49 |
| Heparin cofactor 2 | P05546 | 50 |
| Gelsolin | P06396 | 51 |
| Apolipoprotein A-IV | P06727 | 52 |
| Complement component C8 alpha chain | P07357 | 53 |
| Integrin alpha-Iib | P08514 | 54 |
| Apolipoprotein(a) | P08519 | 55 |
| Complement factor H | P08603 | 56 |
| Alpha-2-antiplasmin | P08697 | 57 |
| Complement C1s subcomponent | P09871 | 58 |
| Complement C4-A | P0C0L4 | 59 |
| Complement C4-B | P0C0L5 | 60 |
| Clusterin | P10909 | 61 |
| Inter-alpha-trypsin inhibitor heavy chain H2 | P19823 | 62 |
| Inter-alpha-trypsin inhibitor heavy chain H1 | P19827 | 63 |
| Zinc-alpha-2-glycoprotein | P25311 | 64 |
| Serum paraoxonase/arylesterase 1 | P27169 | 65 |
| Peroxiredoxin-2 | P32119 | 66 |
| Serum amyloid A-4 protein | P35542 | 67 |
| Afamin | P43652 | 68 |
| Lumican | P51884 | 69 |
| Hemoglobin subunit alpha | P69905 | 70 |
| Inter-alpha-trypsin inhibitor heavy chain H4 | Q14624 | 71 |
| Serum paraoxonase/lactonase 3 | Q15166 | 72 |

comparing the protein biomarker signature from the subject to one or more reference protein biomarker signatures, wherein a change in the protein biomarker signature from the subject relative to the reference protein biomarker signatures is a diagnosis of one or more diseases in the subject; and selecting, prescribing, and/or administering a treatment and/or therapy to the subject based on the diagnosis. In some embodiments, the change in the protein biomarker signature is an increase in the level of one or more proteins in the sample from the subject (or the protein biomarker signature from the subject) relative to a reference sample (or the reference protein biomarker signatures). In some embodiments, the change in the protein biomarker signature is a decrease in the level of one or more proteins in the sample from the subject (or the protein biomarker signature from the subject) relative to a reference sample (or the reference protein biomarker signatures).

[0263] In various embodiments, the present invention provides a method of treating, inhibiting, and/or reducing the severity of a disease in a subject, comprising: obtaining a sample from the subject; contacting the sample with one or more proteases so as to obtain a digested sample, wherein the digested sample comprises one or more peptides; analyzing the digested sample by mass spectrometry so as to obtain mass spectrometry data; correlating the mass spectrometry data to the one or more peptides; correlating the one or more peptides to one or more proteins, wherein the one or more proteins are listed in Table 15; measuring the presence of the one or more proteins in the sample from the subject; comparing the presence of the one or more proteins in the sample from the subject to the presence of the one or more proteins in a reference sample, wherein the presence of one or more proteins in the sample from the subject relative to the reference sample is a diagnosis of one or more diseases in the subject; and selecting, prescribing, and/or administering a treatment and/or therapy to the subject based on the diagnosis.

[0264] In various embodiments, the present invention provides a method of treating, inhibiting, and/or reducing the severity of a disease in a subject, comprising: obtaining a sample from the subject; contacting the sample with one or more proteases so as to obtain a digested sample, wherein the digested sample comprises one or more peptides; analyzing the digested sample by mass spectrometry so as to obtain mass spectrometry data; correlating the mass spectrometry data to the one or more peptides; correlating the one or more peptides to one or more proteins, wherein the one or more proteins are listed in Table 15; measuring an amount or level of the one or more proteins in the sample from the subject; and comparing the amount or level of the one or more proteins in the sample from the subject to an amount or level of the one or more proteins in a reference sample, wherein an increase in the level of one or more proteins in the sample from the subject relative to the reference sample is a diagnosis of one or more diseases in the subject; and selecting, prescribing, and/or administering a treatment and/or therapy to the subject based on the diagnosis.

[0265] In various embodiments, the present invention provides a method of treating, inhibiting, and/or reducing the severity of a disease in a subject, comprising: obtaining a sample from the subject; contacting the sample with one or more proteases so as to obtain a digested sample, wherein the digested sample comprises one or more peptides; analyzing the digested sample by mass spectrometry so as to obtain mass spectrometry data; correlating the mass spectrometry data to the one or more peptides; correlating the one or more peptides to one or more proteins, wherein the one or more proteins are listed in Table 15; measuring an amount or level of the one or more proteins in the sample from the subject; comparing the amount or level of the one or more proteins in the sample from the subject to an amount or level of the one or more proteins in a reference sample, wherein a decrease in the level of one or more proteins in the sample from the subject relative to the reference sample is a diagnosis of one or more diseases in the subject; and selecting, prescribing, and/or administering a treatment and/or therapy to the subject based on the diagnosis.

[0266] In various embodiments, the present invention provides a method of treating, inhibiting, and/or reducing the severity of a disease in a subject, comprising: obtaining a sample from the subject; contacting the sample with one or more proteases so as to obtain a digested sample, wherein the digested sample comprises one or more peptides; analyzing the digested sample by mass spectrometry so as to obtain mass spectrometry data; correlating the mass spectrometry data to the one or more peptides; correlating the one or more peptides to one or more proteins, wherein the one or more proteins are listed in Table 15; measuring an amount or level of the one or more proteins in the sample from the subject; and comparing the amount or level of the one or more proteins in the sample from the subject to an amount or level of the one or more proteins in a reference sample, wherein a change in the level of one or more proteins in the sample from the subject relative to the reference sample is a diagnosis of one or more diseases in the subject; and selecting, prescribing, and/or administering a treatment and/or therapy to the subject based on the diagnosis.

[0267] In some embodiments, the method further comprises assessing the efficacy of the treatment, comprising: comparing the amount or level of the one or more proteins in the sample from the subject to an amount or level of the one or more proteins in a reference sample, wherein a decrease in the amount or level of the one or more proteins in the sample from the subject relative to the amount or level from the reference sample is indicative of the efficacy of the treatment.

[0268] In some embodiments, the method further comprises assessing the efficacy of the treatment, comprising: comparing the amount or level of the one or more proteins in the sample from the subject to an amount or level of the one or more proteins in a reference sample, wherein an increase in the amount or level of the one or more proteins in the sample from the subject relative to the amount or level from the reference sample is indicative of the efficacy of the treatment.

[0269] In some embodiments, the method further comprises assessing the efficacy of the treatment, comprising: comparing the amount or level of the one or more proteins in the sample from the subject to an amount or level of the one or more proteins in a reference sample, wherein a change in the amount or level of the one or more proteins in the sample from the subject relative to the amount or level from the reference sample is indicative of the efficacy of the treatment.

[0270] In some embodiments, the mass spectrometry is selected reaction monitoring (SRM) mass spectrometry or multiple reaction monitoring (MRM) mass spectrometry. In some embodiments, the one or more peptides are correlated to the one or more proteins according to Table 5. In some embodiments, the mass spectrometry data comprises one or more Q1/Q3 mass value pairs, wherein the Q1/Q3 mass value pairs are correlated to the one or more peptides, and the one or more peptides are correlated to the one or more proteins according to Table 5.

[0271] In some embodiments, the mass spectrometry is selected reaction monitoring (SRM) mass spectrometry or multiple reaction monitoring (MRM) mass spectrometry. In some embodiments, the one or more peptides are correlated to the one or more proteins according to Table 7. In some embodiments, the mass spectrometry data comprises one or more precursor ions and one or more product ions, wherein the precursor ions and the product ions are correlated to the one or more peptides, and the one or more peptides are correlated to the one or more proteins according to Table 7.

[0272] In some embodiments, the mass spectrometry is selected reaction monitoring (SRM) mass spectrometry or multiple reaction monitoring (MRM) mass spectrometry. In some embodiments, the one or more peptides are correlated to the one or more proteins according to Table 8. In some embodiments, the mass spectrometry data comprises one or more precursor ions and one or more product ions, wherein the precursor ions and the product ions are correlated to the one or more peptides, and the one or more peptides are correlated to the one or more proteins according to Table 8.

[0273] In some embodiments, the mass spectrometry is parallel reaction monitoring (PRM) mass spectrometry. In some embodiments, the one or more peptides are correlated to the one or more proteins according to Table 9. In some embodiments, the mass spectrometry data comprises one or more precursor ions and one or more product ions, wherein the precursor ions and the product ions are correlated to the one or more peptides, and the one or more peptides are correlated to the one or more proteins according to Table 9.

[0274] In some embodiments, the mass spectrometry is parallel reaction monitoring (PRM) mass spectrometry. In some embodiments, the one or more peptides are correlated to the one or more proteins according to Table 10. In some embodiments, the mass spectrometry data comprises one or more precursor ions and one or more product ions, wherein the precursor ions and the product ions are correlated to the one or more peptides, and the one or more peptides are correlated to the one or more proteins according to Table 10.

[0275] In some embodiments, the mass spectrometry is data dependent acquisition (DDA) mass spectrometry. In some embodiments, the one or more peptides are correlated to the one or more proteins according to Table 11. In some embodiments, the mass spectrometry data comprises one or more precursor ions, wherein the precursor ions are correlated to the one or more peptides, and the one or more peptides are correlated to the one or more proteins according to Table 11.

[0276] In some embodiments, the mass spectrometry is data dependent acquisition (DDA) mass spectrometry. In some embodiments, the one or more peptides are correlated to the one or more proteins according to Table 12. In some embodiments, the mass spectrometry data comprises one or more precursor ions and one or more product ions, wherein the precursor ions and the product ions are correlated to the one or more peptides, and the one or more peptides are correlated to the one or more proteins according to Table 12.

[0277] In some embodiments, the mass spectrometry is data independent acquisition (DIA) mass spectrometry. In some embodiments, the one or more peptides are correlated to the one or more proteins according to Table 13. In some embodiments, the mass spectrometry data comprises one or more precursor ions and one or more product ions, wherein the precursor ions and the product ions are correlated to the one or more peptides, and the one or more peptides are correlated to the one or more proteins according to Table 13.

[0278] In some embodiments, the mass spectrometry is data independent acquisition (DIA) mass spectrometry. In some embodiments, the one or more peptides are correlated to the one or more proteins according to Table 14. In some embodiments, the mass spectrometry data comprises one or more precursor ions and one or more product ions, wherein the precursor ions and the product ions are correlated to the one or more peptides, and the one or more peptides are correlated to the one or more proteins according to Table 14.

[0279] In some embodiments, one or more proteases are any one or more of trypsin, chymotrypsin, endoproteinase Lys-C, endoproteinase Asp-N, pepsin, thermolysin, papain, proteinase K, subtilisin, clostripain, exopeptidase, carboxypeptidase, cathepsin C, cyanogen bromide, formic acid, hydroxylamine, or NTCB, or a combination thereof. In some embodiments, the protease is trypsin.

[0280] In some embodiments, the method further comprises adding one or more internal standards to the sample. In some embodiments, the internal standard comprises one or more stable isotope-labeled peptide standard, one or more isotopically labeled peptides, one or more isotopically labeled proteins, or any combination thereof.

[0281] Methods for Assessing and/or Determining Risk of Developing a Disease

[0282] In various embodiments, the present invention provides a method for assessing and/or determining the risk of developing a disease in a subject; comprising: obtaining a sample from the subject; contacting the sample with one or more proteases so as to obtain a digested sample, wherein the digested sample comprises one or more peptides; analyzing the digested sample by mass spectrometry so as to obtain mass spectrometry data; correlating the mass spectrometry data to the one or more peptides; correlating the one or more peptides to one or more proteins so as to obtain a protein biomarker signature for the subject, wherein the one or more proteins are listed in the following Table:

| | UniProt | SEQ |
|---|---|---|
| Protein Name | Accession No. | ID NO: |
| Apolipoprotein L1 | O14791 | 1 |
| Ceruloplasmin | P00450 | 2 |
| Beta-galactosidase | P00722 | 3 |
| Prothrombin | P00734 | 4 |
| Complement C1r subcomponent | P00736 | 5 |
| Haptoglobin | P00738 | 6 |
| Coagulation factor X | P00742 | 7 |
| Plasminogen | P00747 | 8 |
| Coagulation factor XII | P00748 | 9 |
| Complement factor B | P00751 | 10 |
| Antithrombin-III | P01008 | 11 |
| Alpha-1-antitrypsin | P01009 | 12 |
| Alpha-1-antichymotrypsin | P01011 | 13 |
| Angiotensinogen | P01019 | 14 |
| Alpha-2-macroglobulin | P01023 | 15 |
| Complement C3 | P01024 | 16 |
| Complement C5 | P01031 | 17 |
| Ig gamma-3 chain C region | P01860 | 18 |
| Ig mu chain C region | P01871 | 19 |
| Ig alpha-1 chain C region | P01876 | 20 |
| Apolipoprotein A-I | P02647 | 21 |
| Apolipoprotein E | P02649 | 22 |
| Apolipoprotein A-II | P02652 | 23 |
| Apolipoprotein C-I | P02654 | 24 |
| Apolipoprotein C-II | P02655 | 25 |
| Apolipoprotein C-III | P02656 | 26 |
| Fibrinogen | P02671 | 27 |
| C-reactive protein | P02741 | 28 |
| Complement C1q subcomponent subunit B | P02746 | 29 |
| Complement C1q subcomponent subunit C | P02747 | 30 |
| Complement component C9 | P02748 | 31 |
| Leucine-rich alpha-2-glycoprotein | P02750 | 32 |
| Protein AMBP | P02760 | 33 |
| Alpha-1-acid glycoprotein 1 | P02763 | 34 |
| Alpha-2-HS-glycoprotein | P02765 | 35 |
| Serum albumin | P02768 | 36 |
| Vitamin D-binding protein | P02774 | 37 |
| Serotransferrin | P02787 | 38 |
| Hemopexin | P02790 | 39 |
| Plasma kallikrein | P03952 | 40 |
| C4b-binding protein alpha chain | P04003 | 41 |
| Vitronectin | P04004 | 42 |
| Apolipoprotein B-100 | P04114 | 43 |
| Alpha-1B-glycoprotein | P04217 | 44 |
| von Willebrand factor | P04275 | 45 |
| Sex hormone-binding globulin | P04278 | 46 |
| Plasma serine protease inhibitor | P05154 | 47 |
| Plasma protease C1 inhibitor | P05155 | 48 |
| Thyroxine-binding globulin | P05543 | 49 |
| Heparin cofactor 2 | P05546 | 50 |
| Gelsolin | P06396 | 51 |
| Apolipoprotein A-IV | P06727 | 52 |
| Complement component C8 alpha chain | P07357 | 53 |
| Integrin alpha-Iib | P08514 | 54 |
| Apolipoprotein(a) | P08519 | 55 |
| Complement factor H | P08603 | 56 |
| Alpha-2-antiplasmin | P08697 | 57 |
| Complement C1s subcomponent | P09871 | 58 |
| Complement C4-A | P0C0L4 | 59 |
| Complement C4-B | P0C0L5 | 60 |
| Clusterin | P10909 | 61 |
| Inter-alpha-trypsin inhibitor heavy chain H2 | P19823 | 62 |
| Inter-alpha-trypsin inhibitor heavy chain H1 | P19827 | 63 |
| Zinc-alpha-2-glycoprotein | P25311 | 64 |
| Serum paraoxonase/arylesterase 1 | P27169 | 65 |
| Peroxiredoxin-2 | P32119 | 66 |
| Serum amyloid A-4 protein | P35542 | 67 |
| Afamin | P43652 | 68 |
| Lumican | P51884 | 69 |
| Hemoglobin subunit alpha | P69905 | 70 |
| Inter-alpha-trypsin inhibitor heavy chain H4 | Q14624 | 71 |
| Serum paraoxonase/lactonase 3 | Q15166 | 72 |

and; comparing the protein biomarker signature from the subject to one or more reference protein biomarker signatures, wherein a change in the protein biomarker signature from the subject relative to the reference protein biomarker signatures is indicative of an increased risk of the subject developing the disease. In some embodiments, the method further comprises selecting or prescribing a treatment for the subject based on the determination. In some embodiments, the method further comprises treating the subject based on the determination. In some embodiments, the method further comprises administering a treatment to the subject based on the determination. In some embodiments, the method further comprises providing a treatment to the subject based on the determination. In some embodiments, the method further comprises referring the subject to a specialist based on the determination. In some embodiments, the sample is obtained before, during, or after treatment for the disease. In some embodiments the reference biomarker signature is obtained from a control subject, wherein the control subject does not have the disease. In some embodiments, the reference biomarker signature is obtained from a subject that has been successfully treated for the disease. In some embodiments, the reference biomarker signature is a biomarker signature obtained from the subject at an earlier point in time. In some embodiments, the reference protein biomarker signature is obtained from the subject before the subject is treated for the disease.

[0283] In various embodiments, the present invention provides a method for assessing and/or determining the risk of developing a disease in a subject; comprising: obtaining a sample from the subject; measuring one or more proteins in the sample by mass spectrometry so as to obtain a biomarker signature for the subject, wherein the one or more proteins are listed in Table 15; comparing the biomarker signature from the subject to one or more reference biomarker signatures; and assessing and/or determining the risk of the subject developing the disease based on the comparison, In some embodiments, the method further comprises treating the subject and/or administering a treatment and/or selecting a treatment and/or prescribing a treatment and/or providing a treatment and/or administering a preventative treatment and/or selecting a preventative treatment and/or prescribing a preventative treatment and/or providing a preventative treatment. In some embodiments, the one or more reference biomarker signatures are from one or more subjects having one or more diseases. In some embodiments, the one or more reference biomarker signatures are from one or more healthy subjects. In some embodiments, the subject is determined to be at risk of developing the disease if the comparison of the biomarker signature from the subject to one or more reference biomarker signatures shows a change or difference in the biomarker signature form the subject relative to one or more reference biomarker signatures.

[0284] In various embodiments, the present invention provides a method for assessing and/or determining the risk of developing a disease in a subject; comprising: obtaining a sample from the subject; contacting the sample with one or more proteases so as to obtain a digested sample, wherein the digested sample comprises one or more peptides; analyzing the digested sample by mass spectrometry so as to obtain mass spectrometry data; correlating the mass spectrometry data to the one or more peptides; correlating the one or more peptides to one or more proteins, wherein the one or more proteins are listed in Table 15; comparing an amount or level of the one or more proteins in the sample from the subject to an amount or level of the one or more proteins in a reference sample; and determining that the subject has increased risk of developing the disease if the amount or level of the one or more proteins in the sample is increased relative to the reference sample. In some embodiments, the method further comprises measuring an amount or level of one or more proteins in the sample from the subject. In some embodiments, the method further comprises selecting or prescribing a treatment for the subject based on the determination. In some embodiments, the method further comprises treating the subject based on the determination. In some embodiments, the method further comprises administering a treatment to the subject based on the determination. In some embodiments, the method further comprises providing a treatment to the subject based on the determination. In some embodiments, the method further comprises referring the subject to a specialist based on the determination. In some embodiments, the sample is obtained before, during, or after treatment for the disease. In some embodiments the reference sample is obtained from a control subject, wherein the control subject does not have the disease. In some embodiments, the reference sample is obtained from a subject that has been successfully treated for the disease. In some embodiments, the reference sample is a sample obtained from the subject at an earlier point in time. In some embodiments, the reference sample is obtained from the subject before the subject is treated for the disease.

[0285] In various embodiments, the present invention provides a method for assessing and/or determining the risk of developing a disease in a subject; comprising: obtaining a sample from the subject; contacting the sample with one or more proteases so as to obtain a digested sample, wherein the digested sample comprises one or more peptides; analyzing the digested sample by mass spectrometry so as to obtain mass spectrometry data; correlating the mass spectrometry data to the one or more peptides; correlating the one or more peptides to one or more proteins, wherein the one or more proteins are listed in Table 15; comparing an amount or level of the one or more proteins in the sample from the subject to an amount or level of the one or more proteins in a reference sample; and determining that the subject has increased risk of developing the disease if the amount or level of the one or more proteins in the sample is decreased relative to the reference sample. In some embodiments, the method further comprises measuring an amount or level of one or more proteins in the sample from the subject. In some embodiments, the method further comprises selecting or prescribing a treatment for the subject based on the determination. In some embodiments, the method further comprises treating the subject based on the determination. In some embodiments, the method further comprises administering a treatment to the subject based on the determination. In some embodiments, the method further comprises providing a treatment to the subject based on the determination. In some embodiments, the method further comprises referring the subject to a specialist based on the determination. In some embodiments, the sample is obtained before, during, or after treatment for the disease. In some embodiments the reference sample is obtained from a control subject, wherein the control subject does not have the disease. In some embodiments, the reference sample is obtained from a subject that has been successfully treated for the disease. In some embodiments, the reference sample is a sample obtained from the subject at an earlier point in time. In some embodiments, the reference sample is obtained from the subject before the subject is treated for the disease.

[0286] In various embodiments, the present invention provides a method for assessing and/or determining the risk of developing a disease in a subject; comprising: obtaining a sample from the subject; contacting the sample with one or more proteases so as to obtain a digested sample, wherein the digested sample comprises one or more peptides; analyzing the digested sample by mass spectrometry so as to obtain mass spectrometry data; correlating the mass spectrometry data to the one or more peptides; correlating the one or more peptides to one or more proteins, wherein the one or more proteins are listed in Table 15; comparing an amount or level of the one or more proteins in the sample from the subject to an amount or level of the one or more proteins in a reference sample; and determining that the subject has increased risk of developing the disease if the amount or level of the one or more proteins in the sample is changed relative to the reference sample. In some embodiments, the method further comprises measuring an amount or level of one or more proteins in the sample from the subject. In some embodiments, the method further comprises selecting or prescribing a treatment for the subject based on the determination. In some embodiments, the method further comprises treating the subject based on the determination. In some embodiments, the method further comprises administering a treatment to the subject based on the determination. In some embodiments, the method further comprises providing a treatment to the subject based on the determination. In some embodiments, the method further comprises referring the subject to a specialist based on the determination. In some embodiments, the sample is obtained before, during, or after treatment for the disease. In some embodiments the reference sample is obtained from a control subject, wherein the control subject does not have the disease. In some embodiments, the reference sample is obtained from a subject that has been successfully treated for the disease. In some embodiments, the reference sample is a sample obtained from the subject at an earlier point in time. In some embodiments, the reference sample is obtained from the subject before the subject is treated for the disease.

[0287] In some embodiments, the mass spectrometry is selected reaction monitoring (SRM) mass spectrometry or multiple reaction monitoring (MRM) mass spectrometry. In some embodiments, the one or more peptides are correlated to the one or more proteins according to Table 5. In some embodiments, the mass spectrometry data comprises one or more Q1/Q3 mass value pairs, wherein the Q1/Q3 mass value pairs are correlated to the one or more peptides, and the one or more peptides are correlated to the one or more proteins according to Table 5.

[0288] In some embodiments, the mass spectrometry is selected reaction monitoring (SRM) mass spectrometry or multiple reaction monitoring (MRM) mass spectrometry. In some embodiments, the one or more peptides are correlated to the one or more proteins according to Table 7. In some embodiments, the mass spectrometry data comprises one or more precursor ions and one or more product ions, wherein the precursor ions and the product ions are correlated to the one or more peptides, and the one or more peptides are correlated to the one or more proteins according to Table 7.

[0289] In some embodiments, the mass spectrometry is selected reaction monitoring (SRM) mass spectrometry or multiple reaction monitoring (MRM) mass spectrometry. In some embodiments, the one or more peptides are correlated to the one or more proteins according to Table 8. In some embodiments, the mass spectrometry data comprises one or more precursor ions and one or more product ions, wherein the precursor ions and the product ions are correlated to the one or more peptides, and the one or more peptides are correlated to the one or more proteins according to Table 8.

[0290] In some embodiments, the mass spectrometry is parallel reaction monitoring (PRM) mass spectrometry. In some embodiments, the one or more peptides are correlated to the one or more proteins according to Table 9. In some embodiments, the mass spectrometry data comprises one or more precursor ions and one or more product ions, wherein the precursor ions and the product ions are correlated to the one or more peptides, and the one or more peptides are correlated to the one or more proteins according to Table 9.

[0291] In some embodiments, the mass spectrometry is parallel reaction monitoring (PRM) mass spectrometry. In some embodiments, the one or more peptides are correlated to the one or more proteins according to Table 10. In some embodiments, the mass spectrometry data comprises one or more precursor ions and one or more product ions, wherein the precursor ions and the product ions are correlated to the one or more peptides, and the one or more peptides are correlated to the one or more proteins according to Table 10.

[0292] In some embodiments, the mass spectrometry is data dependent acquisition (DDA) mass spectrometry. In some embodiments, the one or more peptides are correlated to the one or more proteins according to Table 11. In some embodiments, the mass spectrometry data comprises one or more precursor ions, wherein the precursor ions are correlated to the one or more peptides, and the one or more peptides are correlated to the one or more proteins according to Table 11.

[0293] In some embodiments, the mass spectrometry is data dependent acquisition (DDA) mass spectrometry. In some embodiments, the one or more peptides are correlated to the one or more proteins according to Table 12. In some embodiments, the mass spectrometry data comprises one or more precursor ions and one or more product ions, wherein the precursor ions and the product ions are correlated to the one or more peptides, and the one or more peptides are correlated to the one or more proteins according to Table 12.

[0294] In some embodiments, the mass spectrometry is data independent acquisition (DIA) mass spectrometry. In some embodiments, the one or more peptides are correlated to the one or more proteins according to Table 13. In some embodiments, the mass spectrometry data comprises one or more precursor ions and one or more product ions, wherein the precursor ions and the product ions are correlated to the one or more peptides, and the one or more peptides are correlated to the one or more proteins according to Table 13.

[0295] In some embodiments, the mass spectrometry is data independent acquisition (DIA) mass spectrometry. In some embodiments, the one or more peptides are correlated to the one or more proteins according to Table 14. In some embodiments, the mass spectrometry data comprises one or more precursor ions and one or more product ions, wherein the precursor ions and the product ions are correlated to the one or more peptides, and the one or more peptides are correlated to the one or more proteins according to Table 14.

[0296] In some embodiments, one or more proteases are any one or more of trypsin, chymotrypsin, endoproteinase Lys-C, endoproteinase Asp-N, pepsin, thermolysin, papain, proteinase K, subtilisin, clostripain, exopeptidase, carboxypeptidase, cathepsin C, cyanogen bromide, formic acid, hydroxylamine, or NTCB, or a combination thereof. In some embodiments, the protease is trypsin.

[0297] In some embodiments, the method further comprises adding one or more internal standards to the sample. In some embodiments, the internal standard comprises one or more stable isotope-labeled peptide standard, one or more isotopically labeled peptides, one or more isotopically labeled proteins, or any combination thereof.

[0298] Kits

[0299] The exact nature of the components configured in the inventive kit depends on its intended purpose. In one embodiment, the kit is configured particularly for human subjects. In further embodiments, the kit is configured for veterinary applications, treating subjects such as, but not limited to, farm animals, domestic animals, and laboratory animals.

[0300] Instructions for use may be included in the kit. “Instructions for use” typically include a tangible expression describing the technique to be employed in using the components of the kit to effect a desired outcome, such as, for example to treat a disease. Optionally, the kit also contains other useful components, such as, measuring tools, diluents, buffers, pharmaceutical compositions, pharmaceutically acceptable carriers, syringes or other useful paraphernalia as will be readily recognized by those of skill in the art.

[0301] The materials or components assembled in the kit can be provided to the practitioner stored in any convenient and suitable ways that preserve their operability and utility. For example, the components can be dissolved, dehydrated, or lyophilized form; they can be provided at room, refrigerated or frozen temperatures. The components are typically contained in suitable packaging material(s). As employed herein, the phrase “packaging material” refers to one or more physical structures used to house the contents of the kit, such as inventive compositions, systems, articles of manufacture, and/or protein panels, and the like. The packaging material is constructed by well-known methods, for example to provide a sterile, contaminate-free environment. As used herein, the term “package” refers to a suitable solid matrix or material such as glass, plastic, paper, foil, and the like, capable of holding the individual kit components. The packaging material generally has an external label which indicates the contents and/or purpose of the kit an/or its components.

[0302] In various embodiments, the present invention provides a kit for obtaining a protein biomarker signature for a subject, the kit comprising: (a) one or more internal standards suitable for mass spectroscopy; (b) one or more proteases; (c) reagents and instructions for sample processing and preparation; and (d) instructions for using the kit to obtain the protein biomarker signature for the subject. In some embodiments, the internal standard is a stable-isotope labeled peptide standard. In some embodiments, the protease is trypsin. In some embodiments, the protein biomarker signature comprises one or more proteins listed in the following Table:

| | UniProt | SEQ |
|---|---|---|
| Protein Name | Accession No. | ID NO: |
| Apolipoprotein L1 | O14791 | 1 |
| Ceruloplasmin | P00450 | 2 |
| Beta-galactosidase | P00722 | 3 |
| Prothrombin | P00734 | 4 |
| Complement C1r subcomponent | P00736 | 5 |
| Haptoglobin | P00738 | 6 |
| Coagulation factor X | P00742 | 7 |
| Plasminogen | P00747 | 8 |
| Coagulation factor XII | P00748 | 9 |
| Complement factor B | P00751 | 10 |
| Antithrombin-III | P01008 | 11 |
| Alpha-1-antitrypsin | P01009 | 12 |
| Alpha-1-antichymotrypsin | P01011 | 13 |
| Angiotensinogen | P01019 | 14 |
| Alpha-2-macroglobulin | P01023 | 15 |
| Complement C3 | P01024 | 16 |
| Complement C5 | P01031 | 17 |
| Ig gamma-3 chain C region | P01860 | 18 |
| Ig mu chain C region | P01871 | 19 |
| Ig alpha-1 chain C region | P01876 | 20 |
| Apolipoprotein A-I | P02647 | 21 |
| Apolipoprotein E | P02649 | 22 |
| Apolipoprotein A-II | P02652 | 23 |
| Apolipoprotein C-I | P02654 | 24 |
| Apolipoprotein C-II | P02655 | 25 |
| Apolipoprotein C-III | P02656 | 26 |
| Fibrinogen | P02671 | 27 |
| C-reactive protein | P02741 | 28 |
| Complement C1q subcomponent subunit B | P02746 | 29 |
| Complement C1q subcomponent subunit C | P02747 | 30 |
| Complement component C9 | P02748 | 31 |
| Leucine-rich alpha-2-glycoprotein | P02750 | 32 |
| Protein AMBP | P02760 | 33 |
| Alpha-1-acid glycoprotein 1 | P02763 | 34 |
| Alpha-2-HS-glycoprotein | P02765 | 35 |
| Serum albumin | P02768 | 36 |
| Vitamin D-binding protein | P02774 | 37 |
| Serotransferrin | P02787 | 38 |
| Hemopexin | P02790 | 39 |
| Plasma kallikrein | P03952 | 40 |
| C4b-binding protein alpha chain | P04003 | 41 |
| Vitronectin | P04004 | 42 |
| Apolipoprotein B-100 | P04114 | 43 |
| Alpha-1B-glycoprotein | P04217 | 44 |
| von Willebrand factor | P04275 | 45 |
| Sex hormone-binding globulin | P04278 | 46 |
| Plasma serine protease inhibitor | P05154 | 47 |
| Plasma protease C1 inhibitor | P05155 | 48 |
| Thyroxine-binding globulin | P05543 | 49 |
| Heparin cofactor 2 | P05546 | 50 |
| Gelsolin | P06396 | 51 |
| Apolipoprotein A-IV | P06727 | 52 |
| Complement component C8 alpha chain | P07357 | 53 |
| Integrin alpha-Iib | P08514 | 54 |
| Apolipoprotein(a) | P08519 | 55 |
| Complement factor H | P08603 | 56 |
| Alpha-2-antiplasmin | P08697 | 57 |
| Complement C1s subcomponent | P09871 | 58 |
| Complement C4-A | P0C0L4 | 59 |
| Complement C4-B | P0C0L5 | 60 |
| Clusterin | P10909 | 61 |
| Inter-alpha-trypsin inhibitor heavy chain H2 | P19823 | 62 |
| Inter-alpha-trypsin inhibitor heavy chain H1 | P19827 | 63 |
| Zinc-alpha-2-glycoprotein | P25311 | 64 |
| Serum paraoxonase/arylesterase 1 | P27169 | 65 |
| Peroxiredoxin-2 | P32119 | 66 |
| Serum amyloid A-4 protein | P35542 | 67 |
| Afamin | P43652 | 68 |
| Lumican | P51884 | 69 |
| Hemoglobin subunit alpha | P69905 | 70 |
| Inter-alpha-trypsin inhibitor heavy chain H4 | Q14624 | 71 |
| Serum paraoxonase/lactonase 3 | Q15166 | 72 |

[0303] In various embodiments, the present invention provides a kit for identifying one or more proteins in a sample, the kit comprising: (a) one or more internal standards suitable for mass spectroscopy; (b) one or more proteases; (c) reagents and instructions for sample processing and preparation; and (d) instructions for using the kit to identify one or more proteins in the sample. In some embodiments, the internal standard is a stable-isotope labeled peptide standard. In some embodiments, the protease is trypsin. In some embodiments, the one or more proteins are listed in the following Table:

| | UniProt | SEQ |
|---|---|---|
| Protein Name | Accession No. | ID NO: |
| Apolipoprotein L1 | O14791 | 1 |
| Ceruloplasmin | P00450 | 2 |
| Beta-galactosidase | P00722 | 3 |
| Prothrombin | P00734 | 4 |
| Complement C1r subcomponent | P00736 | 5 |
| Haptoglobin | P00738 | 6 |
| Coagulation factor X | P00742 | 7 |
| Plasminogen | P00747 | 8 |
| Coagulation factor XII | P00748 | 9 |
| Complement factor B | P00751 | 10 |
| Antithrombin-III | P01008 | 11 |
| Alpha-1-antitrypsin | P01009 | 12 |
| Alpha-1-antichymotrypsin | P01011 | 13 |
| Angiotensinogen | P01019 | 14 |
| Alpha-2-macroglobulin | P01023 | 15 |
| Complement C3 | P01024 | 16 |
| Complement C5 | P01031 | 17 |
| Ig gamma-3 chain C region | P01860 | 18 |
| Ig mu chain C region | P01871 | 19 |
| Ig alpha-1 chain C region | P01876 | 20 |
| Apolipoprotein A-I | P02647 | 21 |
| Apolipoprotein E | P02649 | 22 |
| Apolipoprotein A-II | P02652 | 23 |
| Apolipoprotein C-I | P02654 | 24 |
| Apolipoprotein C-II | P02655 | 25 |
| Apolipoprotein C-III | P02656 | 26 |
| Fibrinogen | P02671 | 27 |
| C-reactive protein | P02741 | 28 |
| Complement C1q subcomponent subunit B | P02746 | 29 |
| Complement C1q subcomponent subunit C | P02747 | 30 |
| Complement component C9 | P02748 | 31 |
| Leucine-rich alpha-2-glycoprotein | P02750 | 32 |
| Protein AMBP | P02760 | 33 |
| Alpha-1-acid glycoprotein 1 | P02763 | 34 |
| Alpha-2-HS-glycoprotein | P02765 | 35 |
| Serum albumin | P02768 | 36 |
| Vitamin D-binding protein | P02774 | 37 |
| Serotransferrin | P02787 | 38 |
| Hemopexin | P02790 | 39 |
| Plasma kallikrein | P03952 | 40 |
| C4b-binding protein alpha chain | P04003 | 41 |
| Vitronectin | P04004 | 42 |
| Apolipoprotein B-100 | P04114 | 43 |
| Alpha-1B-glycoprotein | P04217 | 44 |
| von Willebrand factor | P04275 | 45 |
| Sex hormone-binding globulin | P04278 | 46 |
| Plasma serine protease inhibitor | P05154 | 47 |
| Plasma protease C1 inhibitor | P05155 | 48 |
| Thyroxine-binding globulin | P05543 | 49 |
| Heparin cofactor 2 | P05546 | 50 |
| Gelsolin | P06396 | 51 |
| Apolipoprotein A-IV | P06727 | 52 |
| Complement component C8 alpha chain | P07357 | 53 |
| Integrin alpha-Iib | P08514 | 54 |
| Apolipoprotein(a) | P08519 | 55 |
| Complement factor H | P08603 | 56 |
| Alpha-2-antiplasmin | P08697 | 57 |
| Complement C1s subcomponent | P09871 | 58 |
| Complement C4-A | P0C0L4 | 59 |
| Complement C4-B | P0C0L5 | 60 |
| Clusterin | P10909 | 61 |
| Inter-alpha-trypsin inhibitor heavy chain H2 | P19823 | 62 |
| Inter-alpha-trypsin inhibitor heavy chain H1 | P19827 | 63 |
| Zinc-alpha-2-glycoprotein | P25311 | 64 |
| Serum paraoxonase/arylesterase 1 | P27169 | 65 |
| Peroxiredoxin-2 | P32119 | 66 |
| Serum amyloid A-4 protein | P35542 | 67 |
| Afamin | P43652 | 68 |
| Lumican | P51884 | 69 |
| Hemoglobin subunit alpha | P69905 | 70 |
| Inter-alpha-trypsin inhibitor heavy chain H4 | Q14624 | 71 |
| Serum paraoxonase/lactonase 3 | Q15166 | 72 |

[0304] In various embodiments, the present invention provides a kit for determining the presence of one or more proteins in a sample, the kit comprising: (a) one or more internal standards suitable for mass spectroscopy; (b) one or more proteases; (c) reagents and instructions for sample processing and preparation; and (d) instructions for using the kit to determine the presence of one or more proteins in the sample. In some embodiments, the internal standard is a stable-isotope labeled peptide standard. In some embodiments, the protease is trypsin. In some embodiments, the one or more proteins are listed in the following Table:

| | UniProt | SEQ |
|---|---|---|
| Protein Name | Accession No. | ID NO: |
| Apolipoprotein L1 | O14791 | 1 |
| Ceruloplasmin | P00450 | 2 |
| Beta-galactosidase | P00722 | 3 |
| Prothrombin | P00734 | 4 |
| Complement C1r subcomponent | P00736 | 5 |
| Haptoglobin | P00738 | 6 |
| Coagulation factor X | P00742 | 7 |
| Plasminogen | P00747 | 8 |
| Coagulation factor XII | P00748 | 9 |
| Complement factor B | P00751 | 10 |
| Antithrombin-III | P01008 | 11 |
| Alpha-1-antitrypsin | P01009 | 12 |
| Alpha-1-antichymotrypsin | P01011 | 13 |
| Angiotensinogen | P01019 | 14 |
| Alpha-2-macroglobulin | P01023 | 15 |
| Complement C3 | P01024 | 16 |
| Complement C5 | P01031 | 17 |
| Ig gamma-3 chain C region | P01860 | 18 |
| Ig mu chain C region | P01871 | 19 |
| Ig alpha-1 chain C region | P01876 | 20 |
| Apolipoprotein A-I | P02647 | 21 |
| Apolipoprotein E | P02649 | 22 |
| Apolipoprotein A-II | P02652 | 23 |
| Apolipoprotein C-I | P02654 | 24 |
| Apolipoprotein C-II | P02655 | 25 |
| Apolipoprotein C-III | P02656 | 26 |
| Fibrinogen | P02671 | 27 |
| C-reactive protein | P02741 | 28 |
| Complement C1q subcomponent subunit B | P02746 | 29 |
| Complement C1q subcomponent subunit C | P02747 | 30 |
| Complement component C9 | P02748 | 31 |
| Leucine-rich alpha-2-glycoprotein | P02750 | 32 |
| Protein AMBP | P02760 | 33 |
| Alpha-1-acid glycoprotein 1 | P02763 | 34 |
| Alpha-2-HS-glycoprotein | P02765 | 35 |
| Serum albumin | P02768 | 36 |
| Vitamin D-binding protein | P02774 | 37 |
| Serotransferrin | P02787 | 38 |
| Hemopexin | P02790 | 39 |
| Plasma kallikrein | P03952 | 40 |
| C4b-binding protein alpha chain | P04003 | 41 |
| Vitronectin | P04004 | 42 |
| Apolipoprotein B-100 | P04114 | 43 |
| Alpha-1B-glycoprotein | P04217 | 44 |
| von Willebrand factor | P04275 | 45 |
| Sex hormone-binding globulin | P04278 | 46 |
| Plasma serine protease inhibitor | P05154 | 47 |
| Plasma protease C1 inhibitor | P05155 | 48 |
| Thyroxine-binding globulin | P05543 | 49 |
| Heparin cofactor 2 | P05546 | 50 |
| Gelsolin | P06396 | 51 |
| Apolipoprotein A-IV | P06727 | 52 |
| Complement component C8 alpha chain | P07357 | 53 |
| Integrin alpha-Iib | P08514 | 54 |
| Apolipoprotein(a) | P08519 | 55 |
| Complement factor H | P08603 | 56 |
| Alpha-2-antiplasmin | P08697 | 57 |
| Complement C1s subcomponent | P09871 | 58 |
| Complement C4-A | P0C0L4 | 59 |
| Complement C4-B | P0C0L5 | 60 |
| Clusterin | P10909 | 61 |
| Inter-alpha-trypsin inhibitor heavy chain H2 | P19823 | 62 |
| Inter-alpha-trypsin inhibitor heavy chain H1 | P19827 | 63 |
| Zinc-alpha-2-glycoprotein | P25311 | 64 |
| Serum paraoxonase/arylesterase 1 | P27169 | 65 |
| Peroxiredoxin-2 | P32119 | 66 |
| Serum amyloid A-4 protein | P35542 | 67 |
| Afamin | P43652 | 68 |
| Lumican | P51884 | 69 |
| Hemoglobin subunit alpha | P69905 | 70 |
| Inter-alpha-trypsin inhibitor heavy chain H4 | Q14624 | 71 |
| Serum paraoxonase/lactonase 3 | Q15166 | 72 |

[0305] In various embodiments, the present invention provides a kit for determining and/or measuring the amount or level of one or more proteins in a sample, the kit comprising: (a) one or more internal standards suitable for mass spectroscopy; (b) one or more proteases; (c) reagents and instructions for sample processing and preparation; and (d) instructions for using the kit to determine and/or measure the amount or level of one or more proteins in the sample. In some embodiments, the internal standard is a stable-isotope labeled peptide standard. In some embodiments, the protease is trypsin. In some embodiments, the one or more proteins are listed in the following Table:

| | UniProt | SEQ |
|---|---|---|
| Protein Name | Accession No. | ID NO: |
| Apolipoprotein L1 | O14791 | 1 |
| Ceruloplasmin | P00450 | 2 |
| Beta-galactosidase | P00722 | 3 |
| Prothrombin | P00734 | 4 |
| Complement C1r subcomponent | P00736 | 5 |
| Haptoglobin | P00738 | 6 |
| Coagulation factor X | P00742 | 7 |
| Plasminogen | P00747 | 8 |
| Coagulation factor XII | P00748 | 9 |
| Complement factor B | P00751 | 10 |
| Antithrombin-III | P01008 | 11 |
| Alpha-1-antitrypsin | P01009 | 12 |
| Alpha-1-antichymotrypsin | P01011 | 13 |
| Angiotensinogen | P01019 | 14 |
| Alpha-2-macroglobulin | P01023 | 15 |
| Complement C3 | P01024 | 16 |
| Complement C5 | P01031 | 17 |
| Ig gamma-3 chain C region | P01860 | 18 |
| Ig mu chain C region | P01871 | 19 |
| Ig alpha-1 chain C region | P01876 | 20 |
| Apolipoprotein A-I | P02647 | 21 |
| Apolipoprotein E | P02649 | 22 |
| Apolipoprotein A-II | P02652 | 23 |
| Apolipoprotein C-I | P02654 | 24 |
| Apolipoprotein C-II | P02655 | 25 |
| Apolipoprotein C-III | P02656 | 26 |
| Fibrinogen | P02671 | 27 |
| C-reactive protein | P02741 | 28 |
| Complement C1q subcomponent subunit B | P02746 | 29 |
| Complement C1q subcomponent subunit C | P02747 | 30 |
| Complement component C9 | P02748 | 31 |
| Leucine-rich alpha-2-glycoprotein | P02750 | 32 |
| Protein AMBP | P02760 | 33 |
| Alpha-1-acid glycoprotein 1 | P02763 | 34 |
| Alpha-2-HS-glycoprotein | P02765 | 35 |
| Serum albumin | P02768 | 36 |
| Vitamin D-binding protein | P02774 | 37 |
| Serotransferrin | P02787 | 38 |
| Hemopexin | P02790 | 39 |
| Plasma kallikrein | P03952 | 40 |
| C4b-binding protein alpha chain | P04003 | 41 |
| Vitronectin | P04004 | 42 |
| Apolipoprotein B-100 | P04114 | 43 |
| Alpha-1B-glycoprotein | P04217 | 44 |
| von Willebrand factor | P04275 | 45 |
| Sex hormone-binding globulin | P04278 | 46 |
| Plasma serine protease inhibitor | P05154 | 47 |
| Plasma protease C1 inhibitor | P05155 | 48 |
| Thyroxine-binding globulin | P05543 | 49 |
| Heparin cofactor 2 | P05546 | 50 |
| Gelsolin | P06396 | 51 |
| Apolipoprotein A-IV | P06727 | 52 |
| Complement component C8 alpha chain | P07357 | 53 |
| Integrin alpha-Iib | P08514 | 54 |
| Apolipoprotein(a) | P08519 | 55 |
| Complement factor H | P08603 | 56 |
| Alpha-2-antiplasmin | P08697 | 57 |
| Complement C1s subcomponent | P09871 | 58 |
| Complement C4-A | P0C0L4 | 59 |
| Complement C4-B | P0C0L5 | 60 |
| Clusterin | P10909 | 61 |
| Inter-alpha-trypsin inhibitor heavy chain H2 | P19823 | 62 |
| Inter-alpha-trypsin inhibitor heavy chain H1 | P19827 | 63 |
| Zinc-alpha-2-glycoprotein | P25311 | 64 |
| Serum paraoxonase/arylesterase 1 | P27169 | 65 |
| Peroxiredoxin-2 | P32119 | 66 |
| Serum amyloid A-4 protein | P35542 | 67 |
| Afamin | P43652 | 68 |
| Lumican | P51884 | 69 |
| Hemoglobin subunit alpha | P69905 | 70 |
| Inter-alpha-trypsin inhibitor heavy chain H4 | Q14624 | 71 |
| Serum paraoxonase/lactonase 3 | Q15166 | 72 |

[0306] In various embodiments, the present invention provides a kit for assessing and/or determining state of health of a subject, the kit comprising: (a) one or more internal standards suitable for mass spectrometry; (b) one or more proteases; (c) reagents and instructions for sample processing and preparation; (d) instructions for using the kit to obtain a protein biomarker signature for the subject and/or instructions for using the kit to determine and/or measure the presence or amount or level of one or more proteins in the sample; (e) one or more reference protein biomarker signatures; and (f) instructions for using the kit to assess and/or determine the state of health of the subject. In some embodiments, the internal standard is a stable-isotope labeled peptide standard. In some embodiments, the protease is trypsin. In some embodiments, the one or more reference biomarker signatures are from one or more subjects having one or more diseases. In some embodiments, the one or more reference biomarker signatures are from one or more healthy subjects.

[0307] In various embodiments, the present invention provides a kit for assessing and/or determining state of health of a subject, the kit comprising: (a) one or more internal standards suitable for mass spectrometry; (b) one or more proteases; (c) reagents and instructions for sample processing and preparation; (d) instructions for using the kit to determine and/or measure the presence or amount or level of one or more proteins in the sample; (e) one or more reference protein biomarker signatures; and (f) instructions for using the kit to assess and/or determine the state of health of the subject. In some embodiments, the internal standard is a stable-isotope labeled peptide standard. In some embodiments, the protease is trypsin. In some embodiments, the one or more reference biomarker signatures are from one or more subjects having one or more diseases. In some embodiments, the one or more reference biomarker signatures are from one or more healthy subjects. In some embodiments, the proteins are one or more proteins listed in Table 15.

[0308] In various embodiments, the present invention provides a kit for determining, identifying, and/or assessing a risk of developing a disease in a subject, the kit comprising: (a) one or more internal standards suitable for mass spectrometry; (b) one or more proteases; (c) reagents and instructions for sample processing and preparation; (d) instructions for using the kit to obtain a protein biomarker signature for the subject and/or instructions for using the kit to determine and/or measure the presence or amount or level of one or more proteins in the sample; (e) one or more reference protein biomarker signatures; and (f) instructions for using the kit to determine, identify, and/or assess a risk of developing the disease in the subject. In some embodiments, the internal standard is a stable-isotope labeled peptide standard. In some embodiments, the protease is trypsin. In some embodiments, the one or more reference biomarker signatures are from one or more subjects having one or more diseases. In some embodiments, the one or more reference biomarker signatures are from one or more healthy subjects. In some embodiments, the protein biomarker signature comprises one or more proteins listed in Table 15. In some embodiments, the proteins are one or more proteins listed in Table 15.

[0309] In various embodiments, the present invention provides a kit for diagnosing a disease in a subject, the kit comprising: (a) one or more internal standards suitable for mass spectrometry; (b) one or more proteases; (c) reagents and instructions for sample processing and preparation; (d) instructions for using the kit to obtain a protein biomarker signature for the subject and/or instructions for using the kit to determine and/or measure the presence or amount or level of one or more proteins in the sample; (e) one or more reference protein biomarker signatures; and (f) instructions for using the kit to diagnose the disease in the subject. In some embodiments, the internal standard is a stable-isotope labeled peptide standard. In some embodiments, the protease is trypsin. In some embodiments, the one or more reference biomarker signatures are from one or more subjects having one or more diseases. In some embodiments, the one or more reference biomarker signatures are from one or more healthy subjects. In some embodiments, the protein biomarker signature comprises one or more proteins listed in Table 15. In some embodiments, the proteins are one or more proteins listed in Table 15.

[0310] In some embodiments, one or more proteases are any one or more of trypsin, chymotrypsin, endoproteinase Lys-C, endoproteinase Asp-N, pepsin, thermolysin, papain, proteinase K, subtilisin, clostripain, exopeptidase, carboxypeptidase, cathepsin C, cyanogen bromide, formic acid, hydroxylamine, or NTCB, or a combination thereof. In some embodiments, the protease is trypsin.

[0311] In some embodiments, the method further comprises adding one or more internal standards to the sample. In some embodiments, the internal standard comprises one or more stable isotope-labeled peptide standard, one or more isotopically labeled peptides, one or more isotopically labeled proteins, or any combination thereof.

[0312] Assays

[0313] In various embodiments, the present invention provides an assay for identifying one or more proteins in a sample from a subject, the assay comprising: obtaining the sample from the subject; contacting the the sample with one or more proteases so as to obtain a digested sample, wherein the digested sample comprises one or more peptides; analyzing the digested sample by mass spectrometry so as to obtain mass spectrometry data; correlating the mass spectrometry data to the one or more peptides; and correlating the one or more peptides to one or more proteins so as to identify one or more proteins in the sample, wherein the one or more proteins are listed in Table 15.

[0314] In various embodiments, the present invention provides an assay for determining the presence of one or more proteins in a sample from a subject, the assay comprising: obtaining the sample from the subject; contacting the sample with one or more proteases so as to obtain a digested sample, wherein the digested sample comprises one or more peptides; analyzing the digested sample by mass spectrometry so as to obtain mass spectrometry data; correlating the mass spectrometry data to the one or more peptides; and correlating the one or more peptides to one or more proteins so as to determine the presence of one or more proteins in the sample, wherein the one or more proteins are listed in Table 15. In some embodiments, the method further comprises measuring and/or detecting the presence of one or more proteins in the sample from the subject.

[0315] In various embodiments, the present invention provides an assay for determining the amount or level of one or more proteins in a sample from a subject, the assay comprising: obtaining the sample from the subject; contacting the sample with one or more proteases so as to obtain a digested sample, wherein the digested sample comprises one or more peptides; analyzing the digested sample by mass spectrometry so as to obtain mass spectrometry data; correlating the mass spectrometry data to the one or more peptides; and correlating the one or more peptides to one or more proteins so as to determine the amount or level of one or more proteins in the sample, wherein the one or more proteins are listed in Table 15. In some embodiments, the method further comprises measuring and/or detecting the amount or level of one or more proteins in the sample from the subject.

[0316] In some embodiments, the mass spectrometry is selected reaction monitoring (SRM) mass spectrometry or multiple reaction monitoring (MRM) mass spectrometry. In some embodiments, the one or more peptides are correlated to the one or more proteins according to Table 5. In some embodiments, the mass spectrometry data comprises one or more Q1/Q3 mass value pairs, wherein the Q1/Q3 mass value pairs are correlated to the one or more peptides, and the one or more peptides are correlated to the one or more proteins according to Table 5.

[0317] In some embodiments, the mass spectrometry is selected reaction monitoring (SRM) mass spectrometry or multiple reaction monitoring (MRM) mass spectrometry. In some embodiments, the one or more peptides are correlated to the one or more proteins according to Table 7. In some embodiments, the mass spectrometry data comprises one or more precursor ions and one or more product ions, wherein the precursor ions and the product ions are correlated to the one or more peptides, and the one or more peptides are correlated to the one or more proteins according to Table 7.

[0318] In some embodiments, the mass spectrometry is selected reaction monitoring (SRM) mass spectrometry or multiple reaction monitoring (MRM) mass spectrometry. In some embodiments, the one or more peptides are correlated to the one or more proteins according to Table 8. In some embodiments, the mass spectrometry data comprises one or more precursor ions and one or more product ions, wherein the precursor ions and the product ions are correlated to the one or more peptides, and the one or more peptides are correlated to the one or more proteins according to Table 8.

[0319] In some embodiments, the mass spectrometry is parallel reaction monitoring (PRM) mass spectrometry. In some embodiments, the one or more peptides are correlated to the one or more proteins according to Table 9. In some embodiments, the mass spectrometry data comprises one or more precursor ions and one or more product ions, wherein the precursor ions and the product ions are correlated to the one or more peptides, and the one or more peptides are correlated to the one or more proteins according to Table 9.

[0320] In some embodiments, the mass spectrometry is parallel reaction monitoring (PRM) mass spectrometry. In some embodiments, the one or more peptides are correlated to the one or more proteins according to Table 10. In some embodiments, the mass spectrometry data comprises one or more precursor ions and one or more product ions, wherein the precursor ions and the product ions are correlated to the one or more peptides, and the one or more peptides are correlated to the one or more proteins according to Table 10.

[0321] In some embodiments, the mass spectrometry is data dependent acquisition (DDA) mass spectrometry. In some embodiments, the one or more peptides are correlated to the one or more proteins according to Table 11. In some embodiments, the mass spectrometry data comprises one or more precursor ions, wherein the precursor ions are correlated to the one or more peptides, and the one or more peptides are correlated to the one or more proteins according to Table 11.

[0322] In some embodiments, the mass spectrometry is data dependent acquisition (DDA) mass spectrometry. In some embodiments, the one or more peptides are correlated to the one or more proteins according to Table 12. In some embodiments, the mass spectrometry data comprises one or more precursor ions and one or more product ions, wherein the precursor ions and the product ions are correlated to the one or more peptides, and the one or more peptides are correlated to the one or more proteins according to Table 12.

[0323] In some embodiments, the mass spectrometry is data independent acquisition (DIA) mass spectrometry. In some embodiments, the one or more peptides are correlated to the one or more proteins according to Table 13. In some embodiments, the mass spectrometry data comprises one or more precursor ions and one or more product ions, wherein the precursor ions and the product ions are correlated to the one or more peptides, and the one or more peptides are correlated to the one or more proteins according to Table 13.

[0324] In some embodiments, the mass spectrometry is data independent acquisition (DIA) mass spectrometry. In some embodiments, the one or more peptides are correlated to the one or more proteins according to Table 14. In some embodiments, the mass spectrometry data comprises one or more precursor ions and one or more product ions, wherein the precursor ions and the product ions are correlated to the one or more peptides, and the one or more peptides are correlated to the one or more proteins according to Table 14.

[0325] In some embodiments, one or more proteases are any one or more of trypsin, chymotrypsin, endoproteinase Lys-C, endoproteinase Asp-N, pepsin, thermolysin, papain, proteinase K, subtilisin, clostripain, exopeptidase, carboxypeptidase, cathepsin C, cyanogen bromide, formic acid, hydroxylamine, or NTCB, or a combination thereof. In some embodiments, the protease is trypsin.

[0326] In some embodiments, the method further comprises adding one or more internal standards to the sample. In some embodiments, the internal standard comprises one or more stable isotope-labeled peptide standard, one or more isotopically labeled peptides, one or more isotopically labeled proteins, or any combination thereof.

[0327] Mass Spectrometry

[0328] Selected Reaction Monitoring (SRM) and Multiple Reaction Monitoring (MRM)

[0329] The terms “SRM” and “MRM” are used interchangeably herein.

[0330] In some embodiments, the mass spectrometry is selected reaction monitoring (SRM) mass spectrometry or multiple reaction monitoring (MRM) mass spectrometry. In some embodiments, the one or more peptides are correlated to the one or more proteins according to Table 5. In some embodiments, the mass spectrometry data comprises one or more Q1/Q3 mass value pairs, wherein the Q1/Q3 mass value pairs are correlated to the one or more peptides, and the one or more peptides are correlated to the one or more proteins according to Table 5.

[0331] In some embodiments, the mass spectrometry is selected reaction monitoring (SRM) mass spectrometry or multiple reaction monitoring (MRM) mass spectrometry. In some embodiments, the one or more peptides are correlated to the one or more proteins according to Table 7.

[0332] In some embodiments, the mass spectrometry is selected reaction monitoring (SRM) mass spectrometry or multiple reaction monitoring (MRM) mass spectrometry. In some embodiments, the mass spectrometry data comprises one or more precursor ions and one or more product ions, wherein the precursor ions and the product ions are correlated to the one or more peptides, and the one or more peptides are correlated to the one or more proteins according to Table 7. In some embodiments, the precursor ions are observed precursor ions, and the product ions are observed product ions.

[0333] In some embodiments, the mass spectrometry is selected reaction monitoring (SRM) mass spectrometry or multiple reaction monitoring (MRM) mass spectrometry. In some embodiments, the one or more peptides are correlated to the one or more proteins according to Table 8.

[0334] In some embodiments, the mass spectrometry is selected reaction monitoring (SRM) mass spectrometry or multiple reaction monitoring (MRM) mass spectrometry. In some embodiments, the mass spectrometry data comprises one or more precursor ions and one or more product ions, wherein the precursor ions and the product ions are correlated to the one or more peptides, and the one or more peptides are correlated to the one or more proteins according to Table 8. In some embodiments, the precursor ions are expected precursor ions, and the product ions are expected product ions.

[0335] Parallel Reaction Monitoring (PRM)

[0336] In some embodiments, the mass spectrometry is parallel reaction monitoring (PRM) mass spectrometry. In some embodiments, the one or more peptides are correlated to the one or more proteins according to Table 9.

[0337] In some embodiments, the mass spectrometry is parallel reaction monitoring (PRM) mass spectrometry. In some embodiments, the mass spectrometry data comprises one or more precursor ions and one or more product ions, wherein the precursor ions and the product ions are correlated to the one or more peptides, and the one or more peptides are correlated to the one or more proteins according to Table 9. In some embodiments, the precursor ions are observed precursor ions, and the product ions are observed product ions.

[0338] In some embodiments, the mass spectrometry is parallel reaction monitoring (PRM) mass spectrometry. In some embodiments, the one or more peptides are correlated to the one or more proteins according to Table 10.

[0339] In some embodiments, the mass spectrometry is parallel reaction monitoring (PRM) mass spectrometry. In some embodiments, the mass spectrometry data comprises one or more precursor ions and one or more product ions, wherein the precursor ions and the product ions are correlated to the one or more peptides, and the one or more peptides are correlated to the one or more proteins according to Table 10. In some embodiments, the precursor ions are expected precursor ions, and the product ions are expected product ions.

[0340] Data Dependent Acquisition (DDA)

[0341] In some embodiments, the mass spectrometry is data dependent acquisition (DDA) mass spectrometry. In some embodiments, the one or more peptides are correlated to the one or more proteins according to Table 11.

[0342] In some embodiments, the mass spectrometry is data dependent acquisition (DDA) mass spectrometry. In some embodiments, the mass spectrometry data comprises one or more precursor ions, wherein the precursor ions are correlated to the one or more peptides, and the one or more peptides are correlated to the one or more proteins according to Table 11. In some embodiments, the precursor ions are observed precursor ions.

[0343] In some embodiments, the mass spectrometry is data dependent acquisition (DDA) mass spectrometry. In some embodiments, the one or more peptides are correlated to the one or more proteins according to Table 12.

[0344] In some embodiments, the mass spectrometry is data dependent acquisition (DDA) mass spectrometry. In some embodiments, the mass spectrometry data comprises one or more precursor ions and one or more product ions, wherein the precursor ions and the product ions are correlated to the one or more peptides, and the one or more peptides are correlated to the one or more proteins according to Table 12. In some embodiments, the precursor ions are expected precursor ions, and the product ions are expected product ions.

[0345] Data Independent Acquisition (DIA)

[0346] In some embodiments, the mass spectrometry is data independent acquisition (DIA) mass spectrometry. In some embodiments, the one or more peptides are correlated to the one or more proteins according to Table 13.

[0347] In some embodiments, the mass spectrometry is data independent acquisition (DIA) mass spectrometry. In some embodiments, the mass spectrometry data comprises one or more precursor ions and one or more product ions, wherein the precursor ions and the product ions are correlated to the one or more peptides, and the one or more peptides are correlated to the one or more proteins according to Table 13. In some embodiments, the precursor ions are observed precursor ions, and the product ions are observed product ions.

[0348] In some embodiments, the mass spectrometry is data independent acquisition (DIA) mass spectrometry. In some embodiments, the one or more peptides are correlated to the one or more proteins according to Table 14.

[0349] In some embodiments, the mass spectrometry is data independent acquisition (DIA) mass spectrometry. In some embodiments, the mass spectrometry data comprises one or more precursor ions and one or more product ions, wherein the precursor ions and the product ions are correlated to the one or more peptides, and the one or more peptides are correlated to the one or more proteins according to Table 14. In some embodiments, the precursor ions are expected precursor ions, and the product ions are expected product ions.

[0350] In some embodiments, the mass spectrometer is a triple quadrupole mass spectrometer. In some embodiments the mass spectrometer is a Triple-Time Of Flight (Triple-TOF) mass spectrometer configured for SWATH or a Q-Exactive mass spectrometer (Thermo Scientific), or any instrument with sufficiently high scan speed and a quadrupole mass filter to perform data independent acquisition. Examples of triple quadrupole mass spectrometers (TQMS) that can perform MRM/SRM/SIM include but are not limited to: QTRAP® 6500 and 5500 System (Sciex); Triple QTriple Quad 6500 System (Sciex); Agilent 6400 Series Triple Quadrupole LC/MS systems; Thermo Scientific™ TSQ™ Triple Quadrupole system; quadrupole time-of-flight (QTOF) mass spectrometers, or hybrid quadrupole-orbitrap (QOrbitrap) mass spectrometers to carry out the peptides/proteins quantitation. Examples of quadrupole time-of-flight (QTOF) mass spectrometers include but are not limited to: TripleTOF® 6600 or 5600 System (Sciex); X500R QTOF System (Sciex); 6500 Series Accurate-Mass Quadrupole Time-of-Flight (Q-TOF) (Agilent); or Xevo G2-XS QT of Quadrupole Time-of-Flight Mass Spectrometry (Waters). Examples of hybrid quadrupole-orbitrap (QObitrap) mass spectrometers include but are not limited to: Q Exactive™ Hybrid Quadrupole-Orbitrap Mass Spectrometer (the Thermo Scientific); or Orbitrap Fusion™ Tribrid™ (the Thermo Scientific).

[0351] In some embodiments, the mass spectrometry technique is tandem mass spectrometry (MS/MS). In some embodiments, the mass spectrometry technique is liquid chromatography-tandom mass spectrometry (LC-MS/MS). In some embodiments, the mass spectrometry technique is liquid chromatography-selected reaction monitoring-mass spectrometry (LC-SRM-MS). In some embodiments, the mass spectrometry technique is liquid chromatography-multiple reaction monitoring-mass spectrometry (LC-MRM-MS). In some embodiments, the mass spectrometry technique is selected reaction monitoring. In some embodiments, the mass spectrometry technique is multiple reaction monitoring. In some embodiments, the mass spectrometry technique is parallel reaction monitoring (PRM). In some embodiments, the mass spectrometry technique is data-independent analysis (DIA). In some embodiments, the mass spectrometry technique is data-dependent analysis (DDA).

[0352] In various embodiments, the samples are biological samples or complex biological samples. In exemplary embodiments, the complex samples include, but are not limited to urine, blood, blood fractions, tissues and/or tissue extracts, cells, body fluids, waters, food, terrain and/or synthetic preparations.

[0353] In various embodiments, the peptides are derived by proteolysis or chemical cleavage of the polypeptide. In an embodiment, a protease is utilized to cleave the polypeptide into peptides. For example, the protease is trypsin. In additional embodiments, proteases or cleavage agents may be used including but not limited to trypsin, chymotrypsin, endoproteinase Lys-C, endoproteinase Asp-N, pepsin, thermolysin, papain, proteinase K, subtilisin, clostripain, exopeptidase, carboxypeptidase, cathepsin C, cyanogen bromide, formic acid, hydroxylamine, or NTCB, or a combination thereof. In some embodiments, the protease is trypsin.

[0354] In various embodiments, the peptides are derived by proteolysis or chemical cleavage of the protein. In an embodiment, a protease is utilized to cleave the protein into peptides. For example, the protease is trypsin. In additional embodiments, proteases or cleavage agents may be used including but not limited to trypsin, chymotrypsin, endoproteinase Lys-C, endoproteinase Asp-N, pepsin, thermolysin, papain, proteinase K, subtilisin, clostripain, exopeptidase, carboxypeptidase, cathepsin C, cyanogen bromide, formic acid, hydroxylamine, or NTCB, or a combination thereof.

[0355] In various other embodiments, a list of candidate peptides to be targeted for detection on the analytical instrument is generated by modeling protein cleavage. In exemplary embodiments, a list of candidate peptides to be targeted for detection on the analytical instrument is generated by modeling trypsin digestion of the polypeptide. In some embodiments, the list of candidate peptides is narrowed by eliminating peptides that, for example, cannot be detected on the analytical instrument. In some embodiments, a list of candidate peptides is narrowed by eliminating: a peptide that has not been previously detected on a mass spectrometer, a peptide susceptible to a modification that interferes with accurate quantitation, a miscleaved peptide comprising an internal protease recognition site, a peptide with relatively inaccessible ends evidenced by the presence of miscleaved peptides, a peptide that is not unique to the sequence of the protein of interest, a peptide not present in the mature protein, or a combination thereof.

[0356] In an embodiment, the detection of a peptide is improved by changing the conditions for fragmenting that peptide prior to detecting a multiplicity of the peptides with the mass spectrometer. In exemplary embodiments, the fragmentation condition is the collision energy.

[0357] In various other embodiments, the method further comprises adding a stable isotope-labeled peptide to the sample prior to mass spectrometry. In some embodiments, the absolute amount of a peptide in the sample is determined by comparing the MS signals of natural and stable isotope-labeled peptides.

[0358] In other embodiments, the comprehensive list of candidate peptides is narrowed by eliminating peptides. In other embodiments, conventional criteria are used to eliminate peptides from the comprehensive list of candidate peptides by eliminating peptides that: (i) were never detected by MS on any instrument, (ii) are not unique to the sequence of the protein of interest, (iii) are not located within the mature protein, (iv) contain amino acid residues such as methionine, cysteine, and/or asparagine that are subjected to posttranslational modifications that interfere with accurate quantitation by mass spectrometry, (v) are miscleaved or partially cleaved, (vi) are post-translationally modified in vivo, (vii) and/or a combination thereof.

[0359] In various other embodiments, transitions for each peptide with high and reproducible peak intensities are identified. In other embodiments, the collision energy for each transition is optimized. In other embodiments, mass spectrometry comprises selected reaction monitoring (SRM), or multiple reaction monitoring (MRM). In other embodiments, SRM or MRM is performed on a triple quadrapole mass spectrometer. In other embodiments, the peptides uniquely associated with the polypeptide of interest are those with high correlations, strong signals, high signal/noise and/or sequences unique to the protein of interest.

[0360] Selected-ion monitoring (SIM) or selected reaction monitoring (SRM) or multiple reaction monitoring (MRM) provide the simplest method set up and the most selective and sensitive quantification. SRM/MRM/SIM is a method used in tandem mass spectrometry in which an ion of a particular mass is selected in the first stage of a tandem mass spectrometer and an ion product of a fragmentation reaction of the precursor ion is selected in the second mass spectrometer stage for detection. Examples of triple quadrupole mass spectrometers (TQMS) that can perform MRM/SRM/SIM include but are not limited to: QTRAP® 6500 and 5500 System (Sciex); Triple QTriple Quad 6500 System (Sciex); Agilent 6400 Series Triple Quadrupole LC/MS systems; or Thermo Scientific™ TSQ™ Triple Quadrupole system.

[0361] In addition to MRM, the choice of peptides can also be quantified through Parallel-Reaction Monitoring (PRM). Parallel reaction monitoring (PRM) is the application of SRM with parallel detection of all transitions in a single analysis using a high resolution mass spectrometer. PRM provides high selectivity, high sensitivity and high-throughput to quantify selected peptide (Q1), hence quantify proteins. Again, multiple peptides can be specifically selected for each protein. PRM methodology uses the quadrupole of a mass spectrometer to isolate a target precursor ion, fragments the targeted precursor ion in the collision cell, and then detects the resulting product ions in the Orbitrap mass analyzer. Quantification is carried out after data acquisition by extracting one or more fragment ions with 5-10 ppm mass windows. PRM uses a quadrupole time-of-flight (QTOF) or hybrid quadrupole-orbitrap (QOrbitrap) mass spectrometer to carry out the peptides/proteins quantitation. Examples of QTOF include but are not limited to: TripleTOF® 6600 or 5600 System (Sciex); X500R QTOF System (Sciex); 6500 Series Accurate-Mass Quadrupole Time-of-Flight (Q-TOF) (Agilent); or Xevo G2-XS QT of Quadrupole Time-of-Flight Mass Spectrometry (Waters). Examples of QObitrap include but are not limited to: Q Exactive™ Hybrid Quadrupole-Orbitrap Mass Spectrometer (the Thermo Scientific); or Orbitrap Fusion™ Tribrid™ (the Thermo Scientific).

[0362] Non-limiting advantages of PRM include elimination of most interferences, provides more accuracy and attomole-level limits of detection and quantification, enables the confident confirmation of the peptide identity with spectral library matching, reduces assay development time since no target transitions need to be preselected, ensures UHPLC-compatible data acquisition speeds with spectrum multiplexing and advanced signal processing.

[0363] In various other embodiments, stable isotope-labeled peptide standards for absolute quantification are used. In other embodiments, the peptide labeled with a stable isotope is used as an internal standard to obtain absolute quantification of the polypeptide of interest. In other embodiments, the peptides are quantified and then the amount of the parent protein present is inferred before digesting the sample with trypsin. In other embodiments, MS responses are used to determine an upper limit of quantification (ULOQ) and a lower limit of quantification (LLOQ).

[0364] In various embodiments, the MS data comprises raw MS data obtained from a mass spectrometer and/or processed MS data in which peptides and their fragments (e.g., transitions and MS peaks) are already identified, analyzed and/or quantified. In various embodiments, the MS data is Selective Reaction Monitoring (SRM) data or Parallel-Reaction Monitoring (PRM) data and/or Multiple Reaction Monitoring (MRM) data. In various embodiments, the MS data is Shotgun CID MS data, Original DIA MS Data, MSE MS data, p2CID MS Data, PAcIFIC MS Data, AIF MS Data, XDLA MS Data, SWATH MS data, or FT-ARM MS Data, or a combination thereof.

[0365] In some embodiments, acquiring MS data does not require operating a mass spectrometer. For examples, MS data can be acquired from MS experiments run previously and/or MS databases. In some embodiments, previously acquired SWATH MS data can be queried with a more comprehensive library to identify additional MS peaks derived from different and macromolecules.

[0366] In various embodiments, acquiring MS data comprises operating a TripleTOF mass spectrometer, a triple quadrupole mass spectrometer, a liquid chromatography-mass spectrometry (LC-MS) system, a gas chromatography-mass spectrometry (GC-MS) system, or a tandem mass spectrometry (MS/MS) system, a dual time-of-flight (TOF-TOF) mass spectrometer, or a combination thereof.

[0367] In various embodiments, acquiring MS data comprises operating a mass spectrometer. Examples of the mass spectrometer include but are not limited to high-resolution instruments such as Triple-TOF, Orbitrap, Fourier transform, and tandem time-of-flight (TOF/TOF) mass spectrometers; and high-sensitivity instruments such as triple quadrupole, ion trap, quadrupole TOF (QTOF), and Q trap mass spectrometers; and their hybrid and/or combination. High-resolution instruments are used to maximize the detection of peptides with minute mass-to-charge ratio (m/z) differences. Conversely, because targeted proteomics emphasize sensitivity and throughput, high-sensitivity instruments are used. In some embodiments, the mass spectrometer is a TripleTOF mass spectrometer. In some embodiments, the mass spectrometer is a triple quadrupole mass spectrometer.

[0368] In various embodiments, the MS data is collected by a targeted acquisition method. Examples of the targeted acquisition method include but are not limited to Selective Reaction Monitoring (SRM) and/or Multiple Reaction Monitoring (MRM) methods. In various embodiments, acquiring MS data comprises acquiring Selective Reaction Monitoring (SRM) data and/or Multiple Reaction Monitoring (MRM) data.

[0369] In various embodiments, the MS data is collected by a data independent acquisition (DIA) method. In various embodiments, the MS data is collected by data dependent acquisition (DDA) method.

[0370] Non-limiting examples of mass spectrometry techniques include collision-induced dissociation (CID), higher-energy collisional dissociation (HCD), electron-transfer dissociation (ETD), etc.

[0371] In various embodiments, the MS data is collected by a data independent acquisition method. Examples of the independent acquisition (DIA) method including but not limited to Shotgun CID (see. e.g., Purvine et al. 2003), Original DIA (see e.g., Venable et al. 2004), MS^{E} (see e.g., Silva et al. 2005), p2CID (see e.g., Ramos et al. 2006), PAcIFIC (see e.g., Panchaud et al. 2009), AIF (see e.g., Geiger et al. 2010), XDLA (see e.g., Carvalho et al. 2010), SWATH (see e.g., Gillet et al. 2012), and FT-ARM (see e.g., Weisbrod et al. 2012). More information can be found in, for example, Chapman et al. (Multiplexed and data-independent tandem mass spectrometry for global proteome profiling, Mass Spectrom Rev. 2014 November-December; 33(6):452-70). In various embodiments, acquiring MS data comprises acquiring Shotgun CID MS data, Original DIA MS Data, MS^{E} MS data, p2CID MS Data, PAcIFIC MS Data, AIF MS Data, XDLA MS Data, SWATH MS data, or FT-ARM MS Data, or a combination thereof. In certain embodiments, acquiring MS data comprises acquiring MS data comprises acquiring SWATH MS data.

[0372] In various embodiments, the sample is food, water, cheek swab, blood, serum, plasma, urine, saliva, semen, cell sample, tissue sample, or tumor sample, or a combination thereof. In some embodiments the sample is plasma, serum, cerebrospinal fluid (CSF), a tissue extract, or a biopsy sample.

[0373] Abbreviations: MS, Mass Spectrometry; LC-MS/MS, liquid chromatography-tandem mass spectrometry; LC-SRM-MS, liquid chromatography selected reaction monitoring mass spectrometry; OGS, N-octyl glucoside; MMTS, Methyl methanethiosulfonate; TCEP, Tris-(2-carboxyethyl)-phosphine; FA, Formic acid; TPCK treated trypsin, Trypsin treated with L-(tosylamido-2-phenyl) ethyl chloromethyl ketone; β-Gal, β-galactosidase; CV %. Coefficient of variation; LC-SRM-MS, Liquid chromatography-selected reaction monitoring mass spectrometry; SIL peptide, Stable Isotope-Labeled Peptide; DIA-MS, Data Independent acquisition mass spectrometry; SPE, solid phase extraction; IQ panel, internal quality panel.

[0374] The automated proteomics sample preparation workflow was first developed and tested with a robust LC-SRM-MS acquisition method for albumin (serum albumin), the highest abundance plasma protein, and β-galactosidase (β-gal), an exogenous protein used for quality control. For compatibility with an automated workflow, we selected reagents that have negligible non-specific side reactions, are stable in ambient light, are LC-MS/MS friendly, and can be stored as frozen aliquots. To monitor consistency (to detect and normalize for any variability arising from the SRM analysis), we added intact β-gal protein and a mixture of stable-isotope labeled (SIL) peptide standards (SIL albumin and β-gal peptides) before the reduction and alkylation reactions.

[0375] As a preliminary test, we automated the reagent addition and mixing steps for a digestion of 5 μL plasma samples with a 16-hour off-deck trypsin incubation followed by manual solid phase extraction (SPE). The variability of the peak area ratios (native/SIL peptide signal) for β-gal and albumin were an unacceptably high 25.6% CV and 27.1% CV, respectively (set B in Table 2a). The variability (coefficient of variation (CVs)) of the peak area ratios (native/SIL peptide signal) for β-gal and albumin were an unacceptably high 25.6% CV and 27.1% CV, respectively (set B in Table 2a).

[0376] To determine which steps in this procedure contributed substantially to technical variation, we pooled samples and then re-aliquoted at different stages in the process (Table 2a and Table 2b). When samples were pooled and re-aliquoted immediately before LC-MS/MS (set D), the average % CV was 4.1% for β-gal and 3.3% for albumin, indicating that the final LC-MS/MS step is highly reproducible. Pooling and re-aliquoting before the SPE desalting step (set C) resulted in an average % CV of 14.8% for β-gal and 18.2% for albumin, indicating that SPE desalting accounted for nearly half of the variability. We tested two online desalting methods as replacements for SPE. The % CVs for β-gal and albumin dropped to 10.0% and 8.0%, respectively, for simple online diversion (set E) and to 10.0% and 7.0%, respectively, with a trap column (set F).

[0377] Optimizing Trypsin Digestion Conditions. In an effort to save time and simplify the procedure, we optimized the digestion workflow by testing various reagents and concentrations, incubation times, and trypsin to substrate ratios. In the revised process, the trypsin to plasma protein ratio was optimized for a two-hour incubation at 37° C. For the initial optimization tests, the digestion plate was removed from the automated workstation, sealed, and shaken at 1000 rpm for two benchtop incubation steps: (1) denaturation and reduction for 1 hour at 60° C. and (2) trypsin digestion at 37° C. After these incubations, the plate was centrifuged briefly and then returned to the automated workstation for additional processing. The trypsin/substrate ration was varied by digesting 2, 4, or 5 μL plasma with a constant amount of trypsin (25 μg) for 2 hours. Assuming a plasma protein concentration of 70 mg/mL, this corresponds to trypsin/substrate (w/w) ratios of 1:5.6, 1:11.2, and 1:14. All three ratios yielded similar results for albumin and β-gal (FIG. 11A), so we chose to use 5 μL of plasma as it allowed us to have more material for additional downstream experiments. Next, the digestion time was varied by quenching reactions with formic acid (FA) and the stroing them at −80° C. until all time points were collected. The signal intensity of all five albumin and β-gal peptides was highest after a 2 hour digestion (FIG. 11B). By automating this streamlined procedure on a Biomek NV Workstation (set G) with a 2 hour digestion at a 1:14 (w/w) trypsin/substrate ratio, the average % CV for the complete process was further reduced to 2.6% for albumin and 5.5% for β-gal. FIG. 1A-FIG. 1B illustrates the schema and protocol for the final automated sample preparation workflow.

[0378] Reproducibility of the Automated Digestion Workflow. To validate the automated proteomics sample preparation workflow, we first evaluated reproducibility across multiple proteins and multiple days for serum albumin, β-gal and five additional well-studied plasma biomarkers: complement C3, alpha-1-antitrypsin, alpha-1-acid glycoprotein 1, hemopexin, and apolipoprotein (Table 3). We processed five replicate samples (pooled normal human serum and pooled normal human plasma) on five different days. Intra-day CVs were calculated by comparing the results of five replicate sample preparations run on the same day; mean intra-day CVs for the seven proteins ranged from 5.5-8.9% in serum and from 3.9-6.2% for plasma (or from 3.9-7.2% for plasma) (Table 1, top). Inter-day CVs were calculated by comparing each replicate run on separate days; mean inter-day CVs for the seven proteins ranged between 5.8-10.6% in serum and between 3.9-6.0% in plasma (Table 1 and Tables 4a-4c). Total CVs were calculated from the square root of the sum of squares of the mean intra- and inter-day CVs; these ranged from 9.2-12.3% for serum and 6.4-8.3% for pooled plasma (or 6.4-9.4% for pooled plasma) (Table 1, bottom). All of the total CVs were less than 20%, satisfying the best practice acceptance criterion for assay validation of LC-MS/MS protein quantitation¹⁵.

[0379] Reproducibility in a Highly Multiplexed SRM Assay. We next validated the general applicability of the optimized workflow with an expanded LC-SRM-MS method targeting 72 high-abundance plasma proteins (Table 5). This internal quality (IQ) SRM-panel monitors a total of 572 transitions from 182 peptides in a single scheduled 50-minute LC run (Table 5). 90% of the IQ transitions had total CVs below 20%, as measured from six replicate automated sample preparations on three independent days (FIG. 2A). The SRM signal intensities ranged from 1×10³ to >1×10⁷ cps (FIG. 2B, right panel), and the transitions with greater intensity had higher precision (FIG. 2B, left panel).

[0380] Reproducibility between laboratories. Reproducibility between laboratories has emerged as a major concern impeding wider acceptance of quantitative MS assays¹⁶. Eliminating the variability associated with manual sample processing in different environments could improve transferability of proteomic LC-MS/MS assays. As part of validation, we implemented an identical automated proteomics sample preparation workflow for plasma in two different laboratories (CSMC and SCIEX), followed by LC-SRM-MS measurement of 93 peptides from 44 proteins on a QTRAP® 6500 system with either micro flow LC (SCIEX) or high flow LC (CSMC). Overall, more than 93% of the peptides had CVs below 20% on at both sites on two separate days (FIG. 4)¹⁷⁻¹⁹.

[0381] Reproducibility Across Plasma Samples. Even with an automated workflow, plasma samples from different individuals might vary in ways that effect accurate quantification. To evaluate matrix effects on the accuracy of MS quantification, the automated workflow as tested on 48 human plasma samples (24 individuals with known coronary artery disease and 24 age and gender matched controls). All samples were processed on a single 96-well plate, and the resulting peptides were analyzed with the highly multiplexed SRM assay. In this analysis, data for peptides derived from β-gal that had been spiked into each sample before processing show the technical variation, which includes effects of the sample matrix on sample processing and analysis (FIG. 12A). Five β-gal peptides had CVs ranging from 6.7 to 10.5% (FIG. 12C). Variations in the amounts of peptides derived from endogenous plasma proteins include a combination of technical variation and biological variation in protein levels (FIG. 12B). Exemplary proteotypic peptides derived from endogenous plasma proteins had CVs ranging from 12.0 to 54.1%, consistent with the expected biological variation between individuals (FIG. 12C). These results demonstrate that the analytical variance is low enough to enable measurements of the biological variation.

[0382] Analytical Selectivity. Despite the highly selective nature of SRM, inference is possible due to the complex and variable composition of plasma. To test for interference, three to five transitions were monitored for each peptide. The best transition, generally a y ion with a high signal and a symmetrical peak, was designated as the quantifier. Other transitions were used for qualification. The relative signal intensities of the qualifier and quantifier transitions should be constant unless there are interferences. Indeed, for six exemplary peptides measured in 48 plasma samples, the qualifier/quantifier ratio for at least one qualifier transition had a CV of less than 4%. Furthermore, all of the qualifier/quantifier ratios had CVs lower than the 20% standard set by the Clinical and Laboratory Standards Institute. Thus, results for the processed plasma samples were not compromised by interferences.

[0383] Data Independent Acquisition-Mass Spectrometry (DIA-MS). Next, we evaluated the applicability of our automated workflow for quantitative global biomarker discovery by DIA-MS^{18,19}. Digested plasma samples from healthy controls (n=8), and individuals with lower urinary tract pathology (n=8) were analyzed by SWATH® Acquisition on a TripleTOF® 6600 MS instrument, with three injections per sample. Overall, we observed 2205 peptides and 14262 ion transitions representing 668 proteins (FIG. 5B). The % CV of spiked β-gal in the samples prepared for SWATH analysis ranged from 6.2% to 13.5%, confirming reproducibility of the automated workflow (FIG. 5A). Furthermore, a comparison between two diseased and two control samples revealed high correlations between the quantified peptides and proteins (FIG. 5C). These correlations suggest that we can obtain quantitative information on thousands of peptides from hundreds of proteins by combining automated sample processing with data-independent MS²⁰.

[0384] There are many thousands of protease cleavage sites within the complex mixture of proteins in serum, plasma and other biological samples, and each protein has unique properties affecting cleavage site accessibility and the stability of the resulting peptides. It is therefore impossible to design a sample processing procedure that is optimal for every protein. The best alternative is to be as consistent as possible. The automated workflow presented here provides a solution for consistent enzymatic digestion. While the vast majority of peptides meet the best practice acceptance criterion for precision, selection of peptides/transitions with MS peak intensities above a certain threshold (such as 1×10⁴ cps for our IQ SRM panel implemented on a QTRAP 6500 MS) can drive CVs below 5% (as illustrated in FIG. 1). Combining the precision and reproducibility provided by automation with robust LC-SRM-MS methods will make it feasible to simultaneously investigate the validity of scores of candidate biomarkers across a large number of samples. Similarly, the uniformity and precision of our automated proteomics sample preparation workflow allows new technologies such as DIA MS to quantify many proteins simultaneously in a biomarker discovery study. In conclusion, application of our automated proteomics sample preparation in both targeted and global protein quantitation provides for improved reproducibility and throughput at all stages of the biomarker development pipeline.

[0385] In various embodiments, the automated sample preparation workflow presented herein increases throughput and vastly reduces the potential for errors resulting from inconsistent pipetting. When combined with online diversion for the final cleanup, the CV for the entire procedure was reduced to less than 20% for the vast majority (90%) of 572 transitions representing 182 peptides from 72 proteins.

Lengthy table referenced here
US20190369114A1-20191205-T00001
Please refer to the end of the specification for access instructions.

Lengthy table referenced here
US20190369114A1-20191205-T00002
Please refer to the end of the specification for access instructions.

Lengthy table referenced here
US20190369114A1-20191205-T00003
Please refer to the end of the specification for access instructions.

Lengthy table referenced here
US20190369114A1-20191205-T00004
Please refer to the end of the specification for access instructions.

Lengthy table referenced here
US20190369114A1-20191205-T00005
Please refer to the end of the specification for access instructions.

Lengthy table referenced here
US20190369114A1-20191205-T00006
Please refer to the end of the specification for access instructions.

Lengthy table referenced here
US20190369114A1-20191205-T00007
Please refer to the end of the specification for access instructions.

Lengthy table referenced here
US20190369114A1-20191205-T00008
Please refer to the end of the specification for access instructions.

Lengthy table referenced here
US20190369114A1-20191205-T00009
Please refer to the end of the specification for access instructions.

Lengthy table referenced here
US20190369114A1-20191205-T00010
Please refer to the end of the specification for access instructions.

Lengthy table referenced here
US20190369114A1-20191205-T00011
Please refer to the end of the specification for access instructions.

Lengthy table referenced here
US20190369114A1-20191205-T00012
Please refer to the end of the specification for access instructions.

Lengthy table referenced here
US20190369114A1-20191205-T00013
Please refer to the end of the specification for access instructions.

Lengthy table referenced here
US20190369114A1-20191205-T00014
Please refer to the end of the specification for access instructions.

Lengthy table referenced here
US20190369114A1-20191205-T00015
Please refer to the end of the specification for access instructions.

Lengthy table referenced here
US20190369114A1-20191205-T00016
Please refer to the end of the specification for access instructions.

Lengthy table referenced here
US20190369114A1-20191205-T00017
Please refer to the end of the specification for access instructions.

Lengthy table referenced here
US20190369114A1-20191205-T00018
Please refer to the end of the specification for access instructions.

[0386] The invention is further illustrated by the following examples which are intended to be purely exemplary of the invention, and which should not be construed as limiting the invention in any way. The following examples are illustrative only, and are not intended to limit, in any manner, any of the aspects described herein. The following examples are provided to better illustrate the claimed invention and are not to be interpreted as limiting the scope of the invention. To the extent that specific materials are mentioned, it is merely for purposes of illustration and is not intended to limit the invention. One skilled in the art may develop equivalent means or reactants without the exercise of inventive capacity and without departing from the scope of the invention.

### EXAMPLES

[0387] Reagents and Supplies:

[0388] Protein Preparation Kit containing denaturant (20% octyl-beta-glucopyranoside (OGS)), reducing reagent (50 mM Tris-(2-carboxyethyl)-phosphine (TCEP)), cysteine blocking reagent (200 mM methyl methane thiosulfate (MMTS)), and digestion buffer (0.1M Tris pH 8.3, 4 mM CaCl₂), and TPCK treated trypsin (Trypsin treated with L-(tosylamido-2-phenyl) ethyl chloromethyl ketone, 500 μg vials) were purchased from SCIEX. Tris base, CaCl₂, octyl-beta-glucopyranoside (OGS), and recombinant E. coli β-galactosidase (β-gal) were purchased from Sigma Aldrich. Tris(2-carboxyethyl)phosphine (TCEP), methyl methane thiosulfate (MMTS), acetonitrile (ACN) and formic acid (FA), 99.5+%, Optima LC/MS Grade were purchased from Thermo Fisher Scientific. 1 mL deep well plates were purchased from Beckman Coulter. Hardshell PCR plates were purchased from Bio-Rad. Xbridge Peptide BEH30 C18 2.1 mm×100 mm, 3.5 μm columns were purchased from Waters. Research grade ¹⁵N-labeled synthetic peptides were purchased from New England Peptide.

[0389] Pooled healthy human EDTA plasma was purchased from Bioreclamation. Pooled healthy human serum was purchased from Scantibodies Laboratory. Control remnant plasma samples from 24 individual ‘healthy’ patients were procured from the Cedars-Sinai Medical Center Core Laboratory. These specimens were deemed normal because every CBC parameter and comprehensive metabolic panel test were within normal ranges. Plasma samples from 48 post-menopausal women donors (mean age 62 years): 24 individuals without coronary artery disease (controls), and 24 individuals with known coronary artery disease (CAD) verified by quantitative coronary angiography as a component of ongoing collaborative research projects. These 48 “control” and “CAD” samples were used to aid in evaluating the influence of biological variability on the quality of workflow performance.

[0390] Multisite Testing.

[0391] Laboratory site 1 (Cedars Sinai Medical Center) used a high-flow LC-MS system as described above. Laboratory site 2 (SCIEX, Redwood City, Calif.) used a nanoLC 425 system (SCIEX) coupled to a QTRAP 6500 (SCIEX) with a microflow mode (5 μL/min) halopeptide (0.3×15 cm) LC column (Eksigent Technology).

### Example 1

[0392] Methods

[0393] Methods and any associated materials are available in online supplemental materials and methods.

[0394] Online Supplemental Materials and Methods:

[0395] Manual Protein Digestion:

[0396] Reagents were from the Protein Preparation Kit 100 Assay (SCIEX, Framingham, Mass.). The reaction was assembled with hand-held pipetters in a 1.5 mL microfuge tube. The reaction mix contained buffer, denaturant, reducing agent, β-gal (Sigma Aldrich, St Louis, Mo.), and SIL peptides (New England Peptide, Gardner, MA). 45 μL reaction mix was added to 5 μL healthy pooled plasma (Bioreclamation LLC, Hicksville, N.Y.). Proteins were denatured and reduced for 1 hour at 60° C. 2.5 alkylating reagent was added and the proteins were further incubated for 10 minutes at 25° C. After adding 60 μL buffer, 10 μL trypsin in 0.1% formic acid (FA) was added and the proteins were digested for 16-18 hours at 37° C. with a trypsin:substrate ratio of 1:20.

[0397] Solid Phase Extraction:

[0398] 96-well Oasis HLB plates were used with a dedicated vacuum manifold (Waters Milford, Mass.). The HLB sorbent was wetted with methanol and then washed 3 times with 1 mL 0.1% formic acid. Each trypsin digest was acidified first with 300 μL of 0.1% FA and then with 400 μL of 4% phosphoric acid. The dilute acidified digests were slowly loaded (˜2 drops/s) onto the sorbent. The wells were washed 3 times with 1 mL 0.1% FA. Purified plasma peptides were eluted with 1 mL of 80% acetonitrile (ACN) in 0.1% FA, dried down using a SPD2010 SpeedVac system (Thermo Scientific, Waltham, Mass.), re-suspended in 2% ACN, and then transferred to autosampler vials for injection into the LC-MS system.

[0399] Digestion Optimization:

[0400] For optimization, samples were processed using automation (see “Automated Protein Digestion”) and the digestion plate was taken off-deck and sealed with a CAPMAT (Beckman Coulter, Indianapolis, Ind.) for two bench-top incubation steps: a) reduction for 1 hour at 60° C. and b) trypsin digestion at 37° C. while shaking at 1000 RPM. After these incubations, the plate was spun briefly and then returned to the Biomek for additional processing. The trypsin digestion conditions were adjusted in an effort to save time and simplify the procedure. After 2, 4 and 18 hours, we quenched digested plasma with formic acid and stored them at −80° C. until all time points were collected (FIG. 3A). Interestingly, the measured amount of albumin peptide LVNEVTEFAK (SEQ ID NO: 76) decreased after 18 hours, possibly due to protease activity in the plasma. Based on these results, the final method incorporated a 2-hour digestion. We next tested trypsin:substrate ratios of 1:5.6 (2 μL plasma), 1:11.5 (4 μL plasma) and 1:14 (5 μL plasma), assuming 70 μg protein per μl plasma (FIG. 3B). All three ratios yielded similar results, so we choose to use 5 μL of plasma as it allowed us to load more onto each LC-MS/MS run. For a two-hour digest of 5 μL plasma, the % CV for the complete process was 4.6% (set Gin Table 2b).

[0401] Online Desalting Optimization:

[0402] Online desalting was investigated as an alternative to SPE with the potential to reduce technical variation by eliminating the need to manually transfer samples and buffers to the SPE plate, control the vacuum pressure to adjust the flow rate, and dry and re-dissolve the eluted peptides. Two methods were tested. In simple online diversion, crude peptides were injected onto the C18 analytical column and the 2% organic flow-through was diverted to waste prior to gradient elution of peptides into the MS. Alternatively, a trap column was inserted upstream of the analytical column, and the trap column flow through was diverted to waste prior to gradient elution of peptides onto the analytical column. The advantage of the trap column is that it protects the more expensive analytical column from exposure to impurities. The advantage of the online diversion is that is a relative simpler solution. Replacing SPE with online desalting reduced the % CV from 26% to 9.1% for simple online diversion (set E in Table 3) or 9.4% for the trap column (set F, in Table 3). The final protocol used simple online diversion.

[0403] Automated Protein Digestion:

[0404] Samples were loaded into a deep well titer plate (Beckman Coulter) with single- or multi-channel pipettes (Eppendorf Hauppauge, N.Y.). The plate was then sealed with X-Pierce™ sealing film (Sigma Aldrich). All other liquid transfers were done on the Biomek NX^{P} Span-8 Laboratory Automation Workstation operated with Biomek software version 4.1 (Beckman Coulter). The instrument included a Shaking Peltier ALP (Inheco, Martinsried, Germany) with a deep well adapter for heating and mixing of samples. The plate was shaken at 1000 RPM for 15 seconds after each reagent addition. Protein Preparation Kit 100 Assay (SCIEX) was adapted for denaturation, reduction and cysteine blocking. For each reaction, the following were added sequentially to 5 μL plasma: 27.5 μL buffer (0.1M Tris pH 8.3, 4 mM CaCl₂), 5 μL Denaturant (20% N-octyl-glucoside, OGS), 5 μL internal standards (2 μg/μL β-galactosidase, Sigma Cat # G3153, 500 pmol/μL for both β-galactosidase and HSA SIL peptides), and 5 μL Reducing Reagent (50 mM TCEP). After all additions were made, the plate was shaken at 1000 RPM at 60° C. for 60 minutes. Next, 2.5 μL Cysteine Blocking Reagent (200 mM methyl methane-thiosulfonate (MMTS)) was added and the plate was shaken for 10 minutes at 1000 RPM. Finally, 10 μL of trypsin (2.5 μg/μL Trypsin (TPCK treated, SCIEX) in 0.1% FA) was added and the 96 well plate was incubated/shaken at 43° C. for 2 hours at 1000 RPM. After incubation, 10 μl of 10% FA was added to quench the reaction. The plate was spun for 5 minutes at 3400 RPM at 4° C. and 10 μL of the supernatant was transferred to 90 μL 2.2% ACN in 0.1% FA prior to SRM analysis (see bottom panel in FIG. 1A-FIG. 1B for protocol details).

[0405] SRM:

[0406] Tryptic plasma peptides and internal standards were analyzed on a Prominence UFLCXR HPLC system (Shimadzu, Japan) with a Waters Xbridge BEH30 C18 2.1 mm×100 mm, 3.5 μm column (Waters) flowing at 0.25 mL/min and 36° C. coupled to a QTRAP® 6500 or 5500 MS (SCIEX) with a Turbo V source. Analyst® software (version 1.6.2 for the QTRAP 6500 or 1.5.2 for the QTRAP 5500) was used to control the LC-MS/MS system and for data acquisition. Mobile phase A consisted of 2% ACN, 98% water, and 0.1% formic acid and mobile phase B of 95% ACN, 5% water, and 0.1% formic acid. The flow rate was 200 pt/min for QTRAP 5500 and 250 μL/min for QTRAP 6500. After loading, the column was equilibrated with 5% B for 5 minutes. Peptides were then eluted over 30 minutes with a linear 5% to 35% gradient of buffer B. The column was washed with 98% B for 10 minutes and then returned to 5% B for 5 minutes before loading the next sample. For online diversion, a two phase switching valve was used to divert the post-column eluent to waste before it entered the ion source. For trap diversion, a C18 trap column (Phenomenex, Torrance, Calif.) was inserted upstream of the Xbridge analytical column and the salt fraction was diverted to waste before entering the analytical column. The SRM MS parameters are shown in Table 5. Each sample was injected on the mass spectrometer in triplicate. All SRM data were processed using MultiQuant™ 2.1 Software (SCIEX).

### Example 2

[0407] Plasma from a Small Research Cohort of Lower Urinary Tract Pathology for SWATH-MS:

[0408] For investigation the utility of automated proteomics sample preparation workflow in SWATH-MS analysis, we selected 16 plasma samples from a lower urinary tract pathology study. We selected 8 controls and 8 individuals with lower urinary tract (diseased) pathology. Peripheral blood samples were obtained by sterile venipuncture into heparin sulfate-coated Vacutainer tubes (Becton Dickinson and Co. Franklin Lakes, N.J.). After centrifugation at 1500×g for 10 minutes, the plasma fraction was decanted off of the cellular pellet and aliquoted into cryotubes and stored at −80° C. until analysis.

[0409] SWATH-MS:

[0410] For the SWATH® acquisition experiment, we digested 5 μL plasma from 8 controls and 8 diseased plasma samples. The digestion was performed with the following modifications to the standard automated workflow: 1) cysteine residues were alkylated with iodoacetamide (with foil covering the digestion plate) for compatibility with our spectral library; 2) the trypsin digestion time was extended to 3 hours; and 3) the samples were manually desalted by SPE. We re-suspended the dried peptides at approximately 0.5 μg digested plasma proteins/μL in a solution of indexed retention time standard peptides (iRTs, Biognosys) in 0.1% FA. To confirm the reproducibility of sample preparation, we quantified β-gal by SRM in a 0.5 μg sample. For SWATH, we separated peptides from 2 μg plasma protein on a NanoLC™ 415 System (SCIEX) operating in trap-elute mode at microflow rates. A 0.3×150 cm ChromXP™ column (SCIEX) was used with a short gradient (3-35% solvent B in 60 min, 35-85% gradient for 3 min, hold at 85% for 5 min, re-equilibrate at 3% B for 7 min (Solvent B: 100% ACN, 0.1% FA in water) at 5 μL/min (total run time 75 min). The MS analysis was performed on a TripleTOF® 6600 system (SCIEX) using a DuoSpray™ Source with a 25 μm I.D. hybrid electrode (SCIEX). Variable window SWATH acquisition methods were built using Analyst® TF Software 1.7. A full MS1 scan (400-1250 Da) was acquired followed by 100 Q1 variable isolation windows across the mass range (400-1250 Da) for improved data quality through increased specificity. Variable sized Q1 windows optimized based on precursor density further increased specificity while ensuring broad mass range coverage (1 MS1 scan at 250 ms dwell followed by 100 VW SWATH MS/MS scans at 30 msec accumulation per window). Mass spectrometry parameters were: GS1=5, GS2=20, curtain gas=25, voltage=5500, temperature=100, rolling collision energy with collision energy spread (CES) of 5 per SWATH window, declustering potential=80.

[0411] Targeted Data Analysis for SWATH-MS:

[0412] SWATH-MS *.wiff files from the data-independent acquisition were first converted to profile mzML using ProteoWizard v.3.0.6002. The whole process of SWATH-targeted data analysis was carried out using OpenSWATH v.2.0.0 running on an internal computing cluster. OpenSWATH utilizes a target-decoy scoring system (PyProphet v.0.13.3) such as mProphet to estimate the identification of FDR. Based on the Twin Study Library, OpenSWATH first identified the peak groups from all individual SWATH maps at a global peptide FDR of 1% and aligned them between SWATH maps based on the clustering behaviors of retention time in each run with a non-linear alignment algorithm. For this analysis, the MS runs were realigned to each other using the LOcally WEighted Scatterplot Smoothing method and the peak group clustering was performed using the LocalMST method. Specifically, only those peptide peak groups that deviate within 3 standard deviations from the retention time were reported and considered for alignment with the max FDR quality of 5% (quality cutoff to still consider a feature for alignment). Next, to obtain high-quality quantitative data at the protein level, we discarded those proteins whose peptides were shared between multiple different proteins (non-proteotypic peptides). Quantitative peptide and protein level summary outputs were then used for all downstream biological analysis.

### Example 3

[0413] Quantifier Transition Validation.

[0414] Three to five transitions were measured for each peptide. The transition with the highest peak area was selected as the quantifier and other transitions were designated as qualifiers. Transition ratios were calculated by dividing the average peak area (n=2 digestions) of a qualifier by the quantifier.

[0415] The various methods and techniques described above provide a number of ways to carry out the application. Of course, it is to be understood that not necessarily all objectives or advantages described can be achieved in accordance with any particular embodiment described herein. Thus, for example, those skilled in the art will recognize that the methods can be performed in a manner that achieves or optimizes one advantage or group of advantages as taught herein without necessarily achieving other objectives or advantages as taught or suggested herein. A variety of alternatives are mentioned herein. It is to be understood that some preferred embodiments specifically include one, another, or several features, while others specifically exclude one, another, or several features, while still others mitigate a particular feature by inclusion of one, another, or several advantageous features.

[0416] Furthermore, the skilled artisan will recognize the applicability of various features from different embodiments. Similarly, the various elements, features and steps discussed above, as well as other known equivalents for each such element, feature or step, can be employed in various combinations by one of ordinary skill in this art to perform methods in accordance with the principles described herein. Among the various elements, features, and steps some will be specifically included and others specifically excluded in diverse embodiments.

[0417] Although the application has been disclosed in the context of certain embodiments and examples, it will be understood by those skilled in the art that the embodiments of the application extend beyond the specifically disclosed embodiments to other alternative embodiments and/or uses and modifications and equivalents thereof.

[0418] Preferred embodiments of this application are described herein, including the best mode known to the inventors for carrying out the application. Variations on those preferred embodiments will become apparent to those of ordinary skill in the art upon reading the foregoing description. It is contemplated that skilled artisans can employ such variations as appropriate, and the application can be practiced otherwise than specifically described herein. Accordingly, many embodiments of this application include all modifications and equivalents of the subject matter recited in the claims appended hereto as permitted by applicable law. Moreover, any combination of the above-described elements in all possible variations thereof is encompassed by the application unless otherwise indicated herein or otherwise clearly contradicted by context.

[0419] All patents, patent applications, publications of patent applications, and other material, such as articles, books, specifications, publications, documents, things, and/or the like, referenced herein are hereby incorporated herein by this reference in their entirety for all purposes, excepting any prosecution file history associated with same, any of same that is inconsistent with or in conflict with the present document, or any of same that may have a limiting affect as to the broadest scope of the claims now or later associated with the present document. By way of example, should there be any inconsistency or conflict between the description, definition, and/or the use of a term associated with any of the incorporated material and that associated with the present document, the description, definition, and/or the use of the term in the present document shall prevail.

[0420] It is to be understood that the embodiments of the application disclosed herein are illustrative of the principles of the embodiments of the application. Other modifications that can be employed can be within the scope of the application. Thus, by way of example, but not of limitation, alternative configurations of the embodiments of the application can be utilized in accordance with the teachings herein. Accordingly, embodiments of the present application are not limited to that precisely as shown and described.

[0421] Various embodiments of the invention are described above in the Detailed Description. While these descriptions directly describe the above embodiments, it is understood that those skilled in the art may conceive modifications and/or variations to the specific embodiments shown and described herein. Any such modifications or variations that fall within the purview of this description are intended to be included therein as well. Unless specifically noted, it is the intention of the inventors that the words and phrases in the specification and claims be given the ordinary and accustomed meanings to those of ordinary skill in the applicable art(s).

[0422] The foregoing description of various embodiments of the invention known to the applicant at this time of filing the application has been presented and is intended for the purposes of illustration and description. The present description is not intended to be exhaustive nor limit the invention to the precise form disclosed and many modifications and variations are possible in the light of the above teachings. The embodiments described serve to explain the principles of the invention and its practical application and to enable others skilled in the art to utilize the invention in various embodiments and with various modifications as are suited to the particular use contemplated. Therefore, it is intended that the invention not be limited to the particular embodiments disclosed for carrying out the invention.

[0423] While particular embodiments of the present invention have been shown and described, it will be obvious to those skilled in the art that, based upon the teachings herein, changes and modifications may be made without departing from this invention and its broader aspects and, therefore, the appended claims are to encompass within their scope all such changes and modifications as are within the true spirit and scope of this invention.

### REFERENCES

[0424] 1. McDonald, W. H. & Yates, J. R., 3rd. Shotgun proteomics and biomarker discovery. Dis Markers 18, 99-105 (2002).
[0425] 2. Anderson, L. & Hunter, C. L. Quantitative mass spectrometric multiple reaction monitoring assays for major plasma proteins. Molecular & Cellular Proteomics 5, 573-588 (2006).
[0426] 3. Toga, A. W. et al. Big biomedical data as the key resource for discovery science. J Am Med Inform Assoc 22, 1126-1131, doi:10.1093/jamia/ocv077 (2015).
[0427] 4. Domon, B. & Aebersold, R. Options and considerations when selecting a quantitative proteomics strategy. Nat Biotechnol 28, 710-721, doi:10.1038/nbt.1661 (2010).
[0428] 5. Smith, R. D. Mass spectrometry in biomarker applications: from untargeted discovery to targeted verification, and implications for platform convergence and clinical application. Clin Chem 58, 528-530, doi:10.1373/clinchem.2011.180596 (2012).
[0429] 6. Liu, Y. et al. Quantitative variability of 342 plasma proteins in a human twin population. Mol Syst Biol 11, 786, doi:10.15252/msb.20145728 (2015).
[0430] 7. McIntosh, M. & Fitzgibbon, M. Biomarker validation by targeted mass spectrometry. Nat Biotechnol 27, 622-623, doi:10.1038/nbt0709-622 (2009).
[0431] 8. Kennedy, J. J. et al. Demonstrating the feasibility of large-scale development of standardized assays to quantify human proteins. Nat Methods 11, 149-155, doi:10.1038/nmeth.2763 (2014).
[0432] 9. Kruger, T., Lehmann, T. & Rhode, H. Effect of quality characteristics of single sample preparation steps in the precision and coverage of proteomic studies—a review. Anal Chim Acta 776, 1-10, doi:10.1016/j.aca.2013.01.020 (2013).
[0433] 10. Dittrich, J., Becker, S., Hecht, M. & Ceglarek, U. Sample preparation strategies for targeted proteomics via proteotypic peptides in human blood using liquid chromatography tandem mass spectrometry. Proteomics Clin Appl 9, 5-16, doi:10.1002/prca.201400121 (2015).
[0434] 11. Addona, T. A. et al. Multi-site assessment of the precision and reproducibility of multiple reaction monitoring-based measurements of proteins in plasma. Nat Biotechnol 27, 633-641, doi:10.1038/nbt.1546 (2009).
[0435] 12. Lowenthal, M. S., Liang, Y., Phinney, K. W. & Stein, S. E. Quantitative bottom-up proteomics depends on digestion conditions. Anal Chem 86, 551-558, doi:10.1021/ac4027274 (2014).
[0436] 13. van den Broek, I. et al. Automated Multiplex LC-MS/MS Assay for Quantifying Serum Apolipoproteins A-I, B, C-I, C-II, C-III, and E with Qualitative Apolipoprotein E Phenotyping. Clin Chem 62, 188-197, doi:10.1373/clinchem.2015.246702 (2016).
[0437] 14. Zhang, Y. V. & Rockwood, A. Impact of automation on mass spectrometry. Clin Chim Acta 450, 298-303, doi:10.1016/j.cca.2015.08.027 (2015).
[0438] 15. Grant, R. P. & Hoofnagle, A. N. From lost in translation to paradise found: enabling protein biomarker method transfer by mass spectrometry. Clin Chem 60, 941-944 (2014).
[0439] 16. Hoofnagle, A. N. Quantitative clinical proteomics by liquid chromatography-tandem mass spectrometry: assessing the platform. Clin Chem 56, 161-164, doi:10.1373/clinchem.2009.134049 (2010).
[0440] 17. Christie Hunter, Q. F., Mike Kowalski, Jennifer E. Van Eyk. Automating Protein Digestion for Reproducible Proteomics, Technote, SCIEX, 2014.
[0441] 18. Sajic, T., Liu, Y. & Aebersold, R. Using data-independent, high-resolution mass spectrometry in protein biomarker research: perspectives and clinical applications. Proteomics Clin Appl 9, 307-321, doi:10.1002/prca.201400117 (2015).
[0442] 19. Croft, N. P. et al. Simultaneous Quantification of Viral Antigen Expression Kinetics Using Data-Independent (DIA) Mass Spectrometry. Molecular & cellular proteomics: MCP 14, 1361-1372, doi:10.1074/mcp.M114.047373 (2015).
[0443] 20. Shao, S., Guo, T. & Aebersold, R. Mass spectrometry-based proteomic quest for diabetes biomarkers. Biochim Biophys Acta 1854, 519-527, doi:10.1016/j.bbapap.2014.12.012 (2015).

LENGTHY TABLES
The patent application contains a lengthy table section. A copy of the table is available in electronic form from the USPTO web site (http://seqdata.uspto.gov/?pageRequest=docDetail&DocID=US20190369114A1). An electronic copy of the table will also be available from the USPTO upon request and payment of the fee set forth in 37 CFR 1.19(b)(3).

1. A protein panel for assessing and/or determining the state of health of a subject, the protein panel comprising one or more proteins listed in the following Table:

| | UniProt | SEQ |
|---|---|---|
| Protein Name | Accession No. | ID NO: |
| Apolipoprotein L1 | O14791 | 1 |
| Ceruloplasmin | P00450 | 2 |
| Beta-galactosidase | P00722 | 3 |
| Prothrombin | P00734 | 4 |
| Complement C1r subcomponent | P00736 | 5 |
| Haptoglobin | P00738 | 6 |
| Coagulation factor X | P00742 | 7 |
| Plasminogen | P00747 | 8 |
| Coagulation factor XII | P00748 | 9 |
| Complement factor B | P00751 | 10 |
| Antithrombin-III | P01008 | 11 |
| Alpha-1-antitrypsin | P01009 | 12 |
| Alpha-1-antichymotrypsin | P01011 | 13 |
| Angiotensinogen | P01019 | 14 |
| Alpha-2-macroglobulin | P01023 | 15 |
| Complement C3 | P01024 | 16 |
| Complement C5 | P01031 | 17 |
| Ig gamma-3 chain C region | P01860 | 18 |
| Ig mu chain C region | P01871 | 19 |
| Ig alpha-1 chain C region | P01876 | 20 |
| Apolipoprotein A-I | P02647 | 21 |
| Apolipoprotein E | P02649 | 22 |
| Apolipoprotein A-II | P02652 | 23 |
| Apolipoprotein C-I | P02654 | 24 |
| Apolipoprotein C-II | P02655 | 25 |
| Apolipoprotein C-III | P02656 | 26 |
| Fibrinogen | P02671 | 27 |
| C-reactive protein | P02741 | 28 |
| Complement C1q subcomponent subunit B | P02746 | 29 |
| Complement C1q subcomponent subunit C | P02747 | 30 |
| Complement component C9 | P02748 | 31 |
| Leucine-rich alpha-2-glycoprotein | P02750 | 32 |
| Protein AMBP | P02760 | 33 |
| Alpha-1-acid glycoprotein 1 | P02763 | 34 |
| Alpha-2-HS-glycoprotein | P02765 | 35 |
| Serum albumin | P02768 | 36 |
| Vitamin D-binding protein | P02774 | 37 |
| Serotransferrin | P02787 | 38 |
| Hemopexin | P02790 | 39 |
| Plasma kallikrein | P03952 | 40 |
| C4b-binding protein alpha chain | P04003 | 41 |
| Vitronectin | P04004 | 42 |
| Apolipoprotein B-100 | P04114 | 43 |
| Alpha-1B-glycoprotein | P04217 | 44 |
| von Willebrand factor | P04275 | 45 |
| Sex hormone-binding globulin | P04278 | 46 |
| Plasma serine protease inhibitor | P05154 | 47 |
| Plasma protease C1 inhibitor | P05155 | 48 |
| Thyroxine-binding globulin | P05543 | 49 |
| Heparin cofactor 2 | P05546 | 50 |
| Gelsolin | P06396 | 51 |
| Apolipoprotein A-IV | P06727 | 52 |
| Complement component C8 alpha chain | P07357 | 53 |
| Integral alpha-Iib | P08514 | 54 |
| Apolipoprotein(a) | P08519 | 55 |
| Complement factor H | P08603 | 56 |
| Alpha-2-antiplasmin | P08697 | 57 |
| Complement C1s subcomponent | P09871 | 58 |
| Complement C4-A | P0C0L4 | 59 |
| Complement C4-B | P0C0L5 | 60 |
| Clusterin | P10909 | 61 |
| Inter-alpha-trypsin inhibitor heavy chain H2 | P19823 | 62 |
| Inter-alpha-trypsin inhibitor heavy chain H1 | P19827 | 63 |
| Zinc-alpha-2-glycoprotein | P25311 | 64 |
| Serum paraoxonase/arylesterase 1 | P27169 | 65 |
| Peroxiredoxin-2 | P32119 | 66 |
| Serum amyloid A-4 protein | P35542 | 67 |
| Afamin | P43652 | 68 |
| Lumican | P51884 | 69 |
| Hemoglobin subunit alpha | P69905 | 70 |
| Inter-alpha-trypsin inhibitor heavy chain H4 | Q14624 | 71 |
| Serum paraoxonase/lactonase 3 | Q15166 | 72 |

2. The protein panel of claim 1, wherein the one or more proteins are biomarkers for one or more functions or combination thereof, and
wherein the functions are inflammatory response, lipid metabolism, redox signaling, immune response, endothelial dysfunction, or coagulation.

3. (canceled)

4. (canceled)

5. The protein panel of claim 1, wherein the one or more proteins are biomarkers for one or more diseases or combination thereof.

6. The protein panel of claim 5, wherein the disease is cardiovascular disease.

7. The protein panel of claim 5, wherein the disease is cardiovascular disease and the proteins are
any one or more of Angiotensinogen (UniProt Accession No. P01019) (SEQ ID NO: 14), Apolipoprotein A-I (UniProt Accession No. P02647) (SEQ ID NO: 21), Apolipoprotein B-100 (UniProt Accession No. P04114) (SEQ ID NO: 43), Apolipoprotein E (UniProt Accession No. P02649) (SEQ ID NO: 22), Complement C3 (UniProt Accession No. P01024) (SEQ ID NO: 16), Complement C4-A (UniProt Accession No. P0C0L4) (SEQ ID NO: 59), Complement C5 (UniProt Accession No. P01031) (SEQ ID NO: 17), Clusterin (UniProt Accession No. P10909) (SEQ ID NO: 61), C-reactive protein (UniProt Accession No. P02741) (SEQ ID NO: 28), Coagulation factor X (UniProt Accession No. P00742) (SEQ ID NO: 7), Coagulation factor XII (UniProt Accession No. P00748) (SEQ ID NO: 9), Prothrombin (UniProt Accession No. P00734) (SEQ ID NO: 4), Gelsolin (UniProt Accession No. P06396) (SEQ ID NO: 51), Integrin alpha-Iib (UniProt Accession No. P08514) (SEQ ID NO: 54), Apolipoprotein(a) (UniProt Accession No. P08519) (SEQ ID NO: 55), Plasminogen (UniProt Accession No. P00747) (SEQ ID NO: 8), Serum paraoxonase/arylesterase 1 (UniProt Accession No. P27169) (SEQ ID NO: 65), Antithrombin-III (UniProt Accession No. P01008) (SEQ ID NO: 11), Plasma protease C1 inhibitor (UniProt Accession No. P05155) (SEQ ID NO: 48), von Willebrand factor (UniProt Accession No. P04275) (SEQ ID NO: 45), or combinations thereof, or
any one or more of Angiotensinogen (UniProt Accession No. P01019) (SEQ ID NO: 14), Apolipoprotein A-I (UniProt Accession No. P02647) ((SEQ ID NO: 21), Apolipoprotein B-100 (UniProt Accession No. P04114) (SEQ ID NO: 43), Apolipoprotein E (UniProt Accession No. P02649) (SEQ ID NO: 22), Complement C3 (UniProt Accession No. P01024) (SEQ ID NO: 16), Complement C4-A (UniProt Accession No. P0C0L4) (SEQ ID NO: 59), Complement C4-B (UniProt Accession No. P0C0L5) (SEQ ID NO: 60), Complement C5 (UniProt Accession No. P01031) (SEQ ID NO: 17), Clusterin (UniProt Accession No. P10909) (SEQ ID NO: 61), C-reactive protein (UniProt Accession No. P02741) (SEQ ID NO: 28), Coagulation factor X (UniProt Accession No. P00742) (SEQ ID NO: 7), Coagulation factor XII (UniProt Accession No. P00748) (SEQ ID NO: 9), Prothrombin (UniProt Accession No. P00734) (SEQ ID NO: 4), Gelsolin (UniProt Accession No. P06396) (SEQ ID NO: 51), Integrin alpha-Iib (UniProt Accession No. P08514) (SEQ ID NO: 54), Apolipoprotein(a) (UniProt Accession No. P08519) (SEQ ID NO: 55), Plasminogen (UniProt Accession No. P00747) (SEQ ID NO: 8), Serum paraoxonase/arylesterase 1 (UniProt Accession No. P27169) (SEQ ID NO: 65), Antithrombin-III (UniProt Accession No. P01008) (SEQ ID NO: 11), Alpha-2-antiplasmin (UniProt Accession No. P08697) (SEQ ID NO: 57), Plasma protease C1 inhibitor (UniProt Accession No. P05155) (SEQ ID NO: 48), von Willebrand factor (UniProt Accession No. P04275) (SEQ ID NO: 45), or combinations thereof.

8. (canceled)

9. (canceled)

10. A method for assessing and/or determining the state of health of a subject, the method comprising:
obtaining a sample from a subject,
contacting the sample with one or more proteases so as to obtain a digested sample, wherein the digested sample comprises one or more peptides;
analyzing the digested sample by mass spectrometry so as to obtain mass spectrometry data;
correlating the mass spectrometry data to the one or more peptides; and
correlating the one or more peptides to one or more proteins, wherein the one or more proteins are listed in the following Table:

| | UniProt | SEQ |
|---|---|---|
| Protein Name | Accession No. | ID NO: |
| Apolipoprotein L1 | O14791 | 1 |
| Ceruloplasmin | P00450 | 2 |
| Beta-galactosidase | P00722 | 3 |
| Prothrombin | P00734 | 4 |
| Complement C1r subcomponent | P00736 | 5 |
| Haptoglobin | P00738 | 6 |
| Coagulation factor X | P00742 | 7 |
| Plasminogen | P00747 | 8 |
| Coagulation factor XII | P00748 | 9 |
| Complement factor B | P00751 | 10 |
| Antithrombin-III | P01008 | 11 |
| Alpha-1-antitrypsin | P01009 | 12 |
| Alpha-1-antichymotrypsin | P01011 | 13 |
| Angiotensinogen | P01019 | 14 |
| Alpha-2-macroglobulin | P01023 | 15 |
| Complement C3 | P01024 | 16 |
| Complement C5 | P01031 | 17 |
| Ig gamma-3 chain C region | P01860 | 18 |
| Ig mu chain C region | P01871 | 19 |
| Ig alpha-1 chain C region | P01876 | 20 |
| Apolipoprotein A-I | P02647 | 21 |
| Apolipoprotein E | P02649 | 22 |
| Apolipoprotein A-II | P02652 | 23 |
| Apolipoprotein C-I | P02654 | 24 |
| Apolipoprotein C-II | P02655 | 25 |
| Apolipoprotein C-III | P02656 | 26 |
| Fibrinogen | P02671 | 27 |
| C-reactive protein | P02741 | 28 |
| Complement C1q subcomponent subunit B | P02746 | 29 |
| Complement C1q subcomponent subunit C | P02747 | 30 |
| Complement component C9 | P02748 | 31 |
| Leucine-rich alpha-2-glycoprotein | P02750 | 32 |
| Protein AMBP | P02760 | 33 |
| Alpha-1-acid glycoprotein 1 | P02763 | 34 |
| Alpha-2-HS-glycoprotein | P02765 | 35 |
| Serum albumin | P02768 | 36 |
| Vitamin D-binding protein | P02774 | 37 |
| Serotransferrin | P02787 | 38 |
| Hemopexin | P02790 | 39 |
| Plasma kallikrein | P03952 | 40 |
| C4b-binding protein alpha chain | P04003 | 41 |
| Vitronectin | P04004 | 42 |
| Apolipoprotein B-100 | P04114 | 43 |
| Alpha-1B-glycoprotein | P04217 | 44 |
| von Willebrand factor | P04275 | 45 |
| Sex hormone-binding globulin | P04278 | 46 |
| Plasma serine protease inhibitor | P05154 | 47 |
| Plasma protease C1 inhibitor | P05155 | 48 |
| Thyroxine-binding globulin | P05543 | 49 |
| Heparin cofactor 2 | P05546 | 50 |
| Gelsolin | P06396 | 51 |
| Apolipoprotein A-IV | P06727 | 52 |
| Complement component C8 alpha chain | P07357 | 53 |
| Integral alpha-Iib | P08514 | 54 |
| Apolipoprotein(a) | P08519 | 55 |
| Complement factor H | P08603 | 56 |
| Alpha-2-antiplasmin | P08697 | 57 |
| Complement C1s subcomponent | P09871 | 58 |
| Complement C4-A | P0C0L4 | 59 |
| Complement C4-B | P0C0L5 | 60 |
| Clusterin | P10909 | 61 |
| Inter-alpha-trypsin inhibitor heavy chain H2 | P19823 | 62 |
| Inter-alpha-trypsin inhibitor heavy chain H1 | P19827 | 63 |
| Zinc-alpha-2-glycoprotein | P25311 | 64 |
| Serum paraoxonase/arylesterase 1 | P27169 | 65 |
| Peroxiredoxin-2 | P32119 | 66 |
| Serum amyloid A-4 protein | P35542 | 67 |
| Afamin | P43652 | 68 |
| Lumican | P51884 | 69 |
| Hemoglobin subunit alpha | P69905 | 70 |
| Inter-alpha-trypsin inhibitor heavy chain H4 | Q14624 | 71 |
| Serum paraoxonase/lactonase 3 | Q15166 | 72 |

and; comparing the presence or level of the one or more proteins in the sample from the subject to the presence or level of the one or more proteins in a reference sample so as to assess and/or determine the state of health of the subject.

11. (canceled)

12. (canceled)

13. (canceled)

14. (canceled)

15. (canceled)

16. The method of claim 10, wherein the mass spectrometry is selected reaction monitoring (SRM) mass spectrometry or multiple reaction monitoring (MRM) mass spectrometry.

17. The method of claim 16, wherein the one or more peptides are correlated to the one or more proteins according to Table 5, or
wherein the mass spectrometry data comprises one or more Q1/Q3 mass value pairs, wherein the Q1/Q3 mass value pairs are correlated to the one or more peptides, and the one or more peptides are correlated to the one or more proteins according to Table 5.

18. (canceled)

19. The method of claim 16, wherein the one or more peptides are correlated to the one or more proteins according to Table 7, or
wherein the mass spectrometry data comprises one or more precursor ions and one or more product ions, wherein the precursor ions and the product ions are correlated to the one or more peptides, and the one or more peptides are correlated to the one or more proteins according to Table 7.

20. (canceled)

21. The method of claim 16, wherein the one or more peptides are correlated to the one or more proteins according to Table 8, or
wherein the mass spectrometry data comprises one or more precursor ions and one or more product ions, wherein the precursor ions and the product ions are correlated to the one or more peptides, and the one or more peptides are correlated to the one or more proteins according to Table 8.

22. (canceled)

23. The method of claim 10, wherein the mass spectrometry is parallel reaction monitoring (PRM) mass spectrometry.

24. The method of claim 23, wherein the one or more peptides are correlated to the one or more proteins according to Table 9, or wherein the mass spectrometry data comprises one or more precursor ions and one or more product ions, wherein the precursor ions and the product ions are correlated to the one or more peptides, and the one or more peptides are correlated to the one or more proteins according to Table 9.

25. (canceled)

26. The method of claim 23, wherein the one or more peptides are correlated to the one or more proteins according to Table 10, or
wherein the mass spectrometry data comprises one or more precursor ions and one or more product ions, wherein the precursor ions and the product ions are correlated to the one or more peptides, and the one or more peptides are correlated to the one or more proteins according to Table 10.

27. (canceled)

28. The method of claim 10, wherein the mass spectrometry is data dependent acquisition (DDA) mass spectrometry.

29. The method of claim 28, wherein the one or more peptides are correlated to the one or more proteins according to Table 11, or wherein the mass spectrometry data comprises one or more precursor ions, wherein the precursor ions are correlated to the one or more peptides, and the one or more peptides are correlated to the one or more proteins according to Table 11.

30. (canceled)

31. The method of claim 28, wherein the one or more peptides are correlated to the one or more proteins according to Table 12, or wherein the mass spectrometry data comprises one or more precursor ions and one or more product ions, wherein the precursor ions and the product ions are correlated to the one or more peptides, and the one or more peptides are correlated to the one or more proteins according to Table 12.

32. (canceled)

33. The method of claim 10, wherein the mass spectrometry is data independent acquisition (DIA) mass spectrometry.

34. The method of claim 33, wherein the one or more peptides are correlated to the one or more proteins according to Table 13, or wherein the mass spectrometry data comprises one or more precursor ions and one or more product ions, wherein the precursor ions and the product ions are correlated to the one or more peptides, and the one or more peptides are correlated to the one or more proteins according to Table 13.

35. (canceled)

36. The method of claim 33, wherein the one or more peptides are correlated to the one or more proteins according to Table 14, or wherein the mass spectrometry data comprises one or more precursor ions and one or more product ions, wherein the precursor ions and the product ions are correlated to the one or more peptides, and the one or more peptides are correlated to the one or more proteins according to Table 14.

37. (canceled)

The application's sequence listing, which the Patent Office published only in electronic form, follows.

SEQUENCE LISTING (1920 sequences)

SEQ ID NO: 1 - protein, 398 aa, Homo sapiens
MEGAALLRVSVLCIWMSALFLGVGVRAEEAGARVQQNVPSGTDTGDPQSKPLGDWAAGTMDPESSIFIEDAIKYFKEKVSTQNLLLLLTDNEAWNGFVAAAELPRNEADELRKALDNLARQMIMKDKNWHDKGQQYRNWFLKEFPRLKSELEDNIRRLRALADGVQKVHKGTTIANVVSGSLSISSGILTLVGMGLAPFTEGGSLVLLEPGMELGITAALTGITSSTMDYGKKWWTQAQAHDLVIKSLDKLKEVREFLGENISNFLSLAGNTYQLTRGIGKDIRALRRARANLQSVPHASASRPRVTEPISAESGEQVERVNEPSILEMSRGVKLTDVAPVSFFLVLDVVYLVYESKHLHEGAKSETAEELKKVAQELEEKLNILNNNYKILQADQEL

SEQ ID NO: 2 - protein, 1065 aa, Homo sapiens
MKILILGIFLFLCSTPAWAKEKHYYIGIIETTWDYASDHGEKKLISVDTEHSNIYLQNGPDRIGRLYKKALYLQYTDETFRTTIEKPVWLGFLGPIIKAETGDKVYVHLKNLASRPYTFHSHGITYYKEHEGAIYPDNTTDFQRADDKVYPGEQYTYMLLATEEQSPGEGDGNCVTRIYHSHIDAPKDIASGLIGPLIICKKDSLDKEKEKHIDREFVVMFSVVDENFSWYLEDNIKTYCSEPEKVDKDNEDFQESNRMYSVNGYTFGSLPGLSMCAEDRVKWYLFGMGNEVDVHAAFFHGQALTNKNYRIDTINLFPATLFDAYMVAQNPGEWMLSCQNLNHLKAGLQAFFQVQECNKSSSKDNIRGKHVRHYYIAAEEIIWNYAPSGIDIFTKENLTAPGSDSAVFFEQGTTRIGGSYKKLVYREYTDASFTNRKERGPEEEHLGILGPVIWAEVGDTIRVTFHNKGAYPLSIEPIGVRFNKNNEGTYYSPNYNPQSRSVPPSASHVAPTETFTYEWTVPKEVGPTNADPVCLAKMYYSAVDPTKDIFTGLIGPMKICKKGSLHANGRQKDVDKEFYLFPTVFDENESLLLEDNIRMFTTAPDQVDKEDEDFQESNKMHSMNGFMYGNQPGLTMCKGDSVVWYLFSAGNEADVHGIYFSGNTYLWRGERRDTANLFPQTSLTLHMWPDTEGTFNVECLTTDHYTGGMKQKYTVNQCRRQSEDSTFYLGERTYYIAAVEVEWDYSPQREWEKELHHLQEQNVSNAFLDKGEFYIGSKYKKVVYRQYTDSTFRVPVERKAEEEHLGILGPQLHADVGDKVKIIFKNMATRPYSIHAHGVQTESSTVTPTLPGETLTYVWKIPERSGAGTEDSACIPWAYYSTVDQVKDLYSGLIGPLIVCRRPYLKVFNPRRKLEFALLFLVFDENESWYLDDNIKTYSDHPEKVNKDDEEFIESNKMHAINGRMFGNLQGLTMHVGDEVNWYLMGMGNEIDLHTVHFHGHSFQYKHRGVYSSDVFDIFPGTYQTLEMFPRTPGIWLLHCHVTDHIHAGMETTYTVLQNEDTKSG

SEQ ID NO: 3 - protein, 1024 aa, Escherichia coli
MTMITDSLAVVLQRRDWENPGVTQLNRLAAHPPFASWRNSEEARTDRPSQQLRSLNGEWRFAWFPAPEAVPESWLECDLPEADTVVVPSNWQMHGYDAPIYTNVTYPITVNPPFVPTENPTGCYSLTFNVDESWLQEGQTRIIFDGVNSAFHLWCNGRWVGYGQDSRLPSEFDLSAFLRAGENRLAVMVLRWSDGSYLEDQDMWRMSGIFRDVSLLHKPTTQISDFHVATRFNDDFSRAVLEAEVQMCGELRDYLRVTVSLWQGETQVASGTAPFGGEIIDERGGYADRVTLRLNVENPKLWSAEIPNLYRAVVELHTADGTLIEAEACDVGFREVRIENGLLLLNGKPLLIRGVNRHEHHPLHGQVMDEQTMVQDILLMKQNNFNAVRCSHYPNHPLWYTLCDRYGLYVVDEANIETHGMVPMNRLTDDPRWLPAMSERVTRMVQRDRNHPSVIIWSLGNESGHGANHDALYRWIKSVDPSRPVQYEGGGADTTATDIICPMYARVDEDQPFPAVPKWSIKKWLSLPGETRPLILCEYAHAMGNSLGGFAKYWQAFRQYPRLQGGFVWDWVDQSLIKYDENGNPWSAYGGDFGDTPNDRQFCMNGLVFADRTPHPALTEAKHQQQFFQFRLSGQTIEVTSEYLFRHSDNELLHWMVALDGKPLASGEVPLDVAPQGKQLIELPELPQPESAGQLWLTVRVVQPNATAWSEAGHISAWQQWRLAENLSVTLPAASHAIPHLTTSEMDFCIELGNKRWQFNRQSGFLSQMWIGDKKQLLTPLRDQFTRAPLDNDIGVSEATRIDPNAWVERWKAAGHYQAEAALLQCTADTLADAVLITTAHAWQHQGKTLFISRKTYRIDGSGQMAITVDVEVASDTPHPARIGLNCQLAQVAERVNWLGLGPQENYPDRLTAACFDRWDLPLSDMYTPYVFPSENGLRCGTRELNYGPHQWRGDFQFNISRYSQQQLMETSHRHLLHAEEGTWLNIDGFHMGIGGDDSWSPSVSAEFQLSAGRYHYQLVWCQK

SEQ ID NO: 4 - protein, 622 aa, Homo sapiens
MAHVRGLQLPGCLALAALCSLVHSQHVFLAPQQARSLLQRVRRANTFLEEVRKGNLERECVEETCSYEEAFEALESSTATDVFWAKYTACETARTPRDKLAACLEGNCAEGLGTNYRGHVNITRSGIECQLWRSRYPHKPEINSTTHPGADLQENFCRNPDSSTTGPWCYTTDPTVRRQECSIPVCGQDQVTVAMTPRSEGSSVNLSPPLEQCVPDRGQQYQGRLAVTTHGLPCLAWASAQAKALSKHQDFNSAVQLVENFCRNPDGDEEGVWCYVAGKPGDFGYCDLNYCEEAVEEETGDGLDEDSDRAIEGRTATSEYQTFFNPRTFGSGEADCGLRPLFEKKSLEDKTERELLESYIDGRIVEGSDAEIGMSPWQVMLFRKSPQELLCGASLISDRWVLTAAHCLLYPPWDKNFTENDLLVRIGKHSRTRYERNIEKISMLEKIYIHPRYNWRENLDRDIALMKLKKPVAFSDYIHPVCLPDRETAASLLQAGYKGRVTGWGNLKETWTANVGKGQPSVLQVVNLPIVERPVCKDSTRIRITDNMFCAGYKPDEGKRGDACEGDSGGPFVMKSPFNNRWYQMGIVSWGEGCDRDGKYGFYTHVFRLKKWIQKVIDQFGE

SEQ ID NO: 5 - protein, 705 aa, Homo sapiens
MWLLYLLVPALFCRAGGSIPIPQKLFGEVTSPLFPKPYPNNFETTTVITVPTGYRVKLVFQQFDLEPSEGCFYDYVKISADKKSLGRFCGQLGSPLGNPPGKKEFMSQGNKMLLTFHTDFSNEENGTIMFYKGFLAYYQAVDLDECASRSKSGEEDPQPQCQHLCHNYVGGYFCSCRPGYELQEDTHSCQAECSSELYTEASGYISSLEYPRSYPPDLRCNYSIRVERGLTLHLKFLEPFDIDDHQQVHCPYDQLQIYANGKNIGEFCGKQRPPDLDTSSNAVDLLFFTDESGDSRGWKLRYTTEIIKCPQPKTLDEFTIIQNLQPQYQFRDYFIATCKQGYQLIEGNQVLHSFTAVCQDDGTWHRAMPRCKIKDCGQPRNLPNGDFRYTTTMGVNTYKARIQYYCHEPYYKMQTRAGSRESEQGVYTCTAQGIWKNEQKGEKIPRCLPVCGKPVNPVEQRQRIIGGQKAKMGNFPWQVFTNIHGRGGGALLGDRWILTAAHTLYPKEHEAQSNASLDVFLGHTNVEELMKLGNHPIRRVSVHPDYRQDESYNFEGDIALLELENSVTLGPNLLPICLPDNDTFYDLGLMGYVSGFGVMEEKIAHDLRFVRLPVANPQACENWLRGKNRMDVFSQNMFCAGHPSLKQDACQGDSGGVFAVRDPNTDRWVATGIVSWGIGCSRGYGFYTKVLNYVDWIKKEMEEED

SEQ ID NO: 6 - protein, 406 aa, Homo sapiens
MSALGAVIALLLWGQLFAVDSGNDVTDIADDGCPKPPEIAHGYVEHSVRYQCKNYYKLRTEGDGVYTLNDKKQWINKAVGDKLPECEADDGCPKPPEIAHGYVEHSVRYQCKNYYKLRTEGDGVYTLNNEKQWINKAVGDKLPECEAVCGKPKNPANPVQRILGGHLDAKGSFPWQAKMVSHHNLTTGATLINEQWLLTTAKNLFLNHSENATAKDIAPTLTLYVGKKQLVEIEKVVLHPNYSQVDIGLIKLKQKVSVNERVMPICLPSKDYAEVGRVGYVSGWGRNANFKFTDHLKYVMLPVADQDQCIRHYEGSTVPEKKTPKSPVGVQPILNEHTFCAGMSKYQEDTCYGDAGSAFAVHDLEEDTWYATGILSFDKSCAVAEYGVYVKVTSIQDWVQKTIAEN

SEQ ID NO: 7 - protein, 488 aa, Homo sapiens
MGRPLHLVLLSASLAGLLLLGESLFIRREQANNILARVTRANSFLEEMKKGHLERECMEETCSYEEAREVFEDSDKTNEFWNKYKDGDQCETSPCQNQGKCKDGLGEYTCTCLEGFEGKNCELFTRKLCSLDNGDCDQFCHEEQNSVVCSCARGYTLADNGKACIPTGPYPCGKQTLERRKRSVAQATSSSGEAPDSITWKPYDAADLDPTENPFDLLDFNQTQPERGDNNLTRIVGGQECKDGECPWQALLINEENEGFCGGTILSEFYILTAAHCLYQAKRFKVRVGDRNTEQEEGGEAVHEVEVVIKHNRFTKETYDFDIAVLRLKTPITFRMNVAPACLPERDWAESTLMTQKTGIVSGFGRTHEKGRQSTRLKMLEVPYVDRNSCKLSSSFIITQNMFCAGYDTKQEDACQGDSGGPHVTRFKDTYFVTGIVSWGEGCARKGKYGIYTKVTAFLKWIDRSMKTRGLPKAKSHAPEVITSSPLK

SEQ ID NO: 8 - protein, 810 aa, Homo sapiens
MEHKEVVLLLLLFLKSGQGEPLDDYVNTQGASLFSVTKKQLGAGSIEECAAKCEEDEEFTCRAFQYHSKEQQCVIMAENRKSSIIIRMRDVVLFEKKVYLSECKTGNGKNYRGTMSKTKNGITCQKWSSTSPHRPRFSPATHPSEGLEENYCRNPDNDPQGPWCYTTDPEKRYDYCDILECEEECMHCSGENYDGKISKTMSGLECQAWDSQSPHAHGYIPSKFPNKNLKKNYCRNPDRELRPWCFTTDPNKRWELCDIPRCTTPPPSSGPTYQCLKGTGENYRGNVAVTVSGHTCQHWSAQTPHTHNRTPENFPCKNLDENYCRNPDGKRAPWCHTTNSQVRWEYCKIPSCDSSPVSTEQLAPTAPPELTPVVQDCYHGDGQSYRGTSSTTTTGKKCQSWSSMTPHRHQKTPENYPNAGLTMNYCRNPDADKGPWCFTTDPSVRWEYCNLKKCSGTEASVVAPPPVVLLPDVETPSEEDCMFGNGKGYRGKRATTVTGTPCQDWAAQEPHRHSIFTPETNPRAGLEKNYCRNPDGDVGGPWCYTTNPRKLYDYCDVPQCAAPSFDCGKPQVEPKKCPGRVVGGCVAHPHSWPWQVSLRTRFGMHFCGGTLISPEWVLTAAHCLEKSPRPSSYKVILGAHQEVNLEPHVQEIEVSRLFLEPTRKDIALLKLSSPAVITDKVIPACLPSPNYVVADRTECFITGWGETQGTFGAGLLKEAQLPVIENKVCNRYEFLNGRVQSTELCAGHLAGGTDSCQGDSGGPLVCFEKDKYILQGVTSWGLGCARPNKPGVYVRVSRFVTWIEGVMRNN

SEQ ID NO: 9 - protein, 615 aa, Homo sapiens
MRALLLLGFLLVSLESTLSIPPWEAPKEHKYKAEEHTVVLTVTGEPCHFPFQYHRQLYHKCTHKGRPGPQPWCATTPNFDQDQRWGYCLEPKKVKDHCSKHSPCQKGGTCVNMPSGPHCLCPQHLTGNHCQKEKCFEPQLLRFFHKNEIWYRTEQAAVARCQCKGPDAHCQRLASQACRTNPCLHGGRCLEVEGHRLCHCPVGYTGAFCDVDTKASCYDGRGLSYRGLARTTLSGAPCQPWASEATYRNVTAEQARNWGLGGHAFCRNPDNDIRPWCFVLNRDRLSWEYCDLAQCQTPTQAAPPTPVSPRLHVPLMPAQPAPPKPQPTTRTPPQSQTPGALPAKREQPPSLTRNGPLSCGQRLRKSLSSMTRVVGGLVALRGAHPYIAALYWGHSFCAGSLIAPCWVLTAAHCLQDRPAPEDLTVVLGQERRNHSCEPCQTLAVRSYRLHEAFSPVSYQHDLALLRLQEDADGSCALLSPYVQPVCLPSGAARPSETTLCQVAGWGHQFEGAEEYASFLQEAQVPFLSLERCSAPDVHGSSILPGMLCAGFLEGGTDACQGDSGGPLVCEDQAAERRLTLQGIISWGSGCGDRNKPGVYTDVAYYLAWIREHTVS

SEQ ID NO: 10 - protein, 764 aa, Homo sapiens
MGSNLSPQLCLMPFILGLLSGGVTTTPWSLARPQGSCSLEGVEIKGGSFRLLQEGQALEYVCPSGFYPYPVQTRTCRSTGSWSTLKTQDQKTVRKAECRAIHCPRPHDFENGEYWPRSPYYNVSDEISFHCYDGYTLRGSANRTCQVNGRWSGQTAICDNGAGYCSNPGIPIGTRKVGSQYRLEDSVTYHCSRGLTLRGSQRRTCQEGGSWSGTEPSCQDSFMYDTPQEVAEAFLSSLTETIEGVDAEDGHGPGEQQKRKIVLDPSGSMNIYLVLDGSDSIGASNFTGAKKCLVNLIEKVASYGVKPRYGLVTYATYPKIWVKVSEADSSNADWVTKQLNEINYEDHKLKSGTNTKKALQAVYSMMSWPDDVPPEGWNRTRHVIILMTDGLHNMGGDPITVIDEIRDLLYIGKDRKNPREDYLDVYVFGVGPLVNQVNINALASKKDNEQHVFKVKDMENLEDVFYQMIDESQSLSLCGMVWEHRKGTDYHKQPWQAKISVIRPSKGHESCMGAVVSEYFVLTAAHCFTVDDKEHSIKVSVGGEKRDLEIEVVLFHPNYNINGKKEAGIPEFYDYDVALIKLKNKLKYGQTIRPICLPCTEGTTRALRLPPTTTCQQQKEELLPAQDIKALFVSEEEKKLTRKEVYIKNGDKKGSCERDAQYAPGYDKVKDISEVVTPRFLCTGGVSPYADPNTCRGDSGGPLIVHKRSRFIQVGVISWGVVDVCKNQKRQKQVPAHARDFHINLFQVLPWLKEKLQDEDLGFL

SEQ ID NO: 11 - protein, 464 aa, Homo sapiens
MYSNVIGTVTSGKRKVYLLSLLLIGFWDCVTCHGSPVDICTAKPRDIPMNPMCIYRSPEKKATEDEGSEQKIPEATNRRVWELSKANSRFATTFYQHLADSKNDNDNIFLSPLSISTAFAMTKLGACNDTLQQLMEVFKFDTISEKTSDQIHFFFAKLNCRLYRKANKSSKLVSANRLFGDKSLTFNETYQDISELVYGAKLQPLDFKENAEQSRAAINKWVSNKTEGRITDVIPSEAINELTVLVLVNTIYFKGLWKSKFSPENTRKELFYKADGESCSASMMYQEGKFRYRRVAEGTQVLELPFKGDDITMVLILPKPEKSLAKVEKELTPEVLQEWLDELEEMMLVVHMPRFRIEDGFSLKEQLQDMGLVDLFSPEKSKLPGIVAEGRDDLYVSDAFHKAFLEVNEEGSEAAASTAVVIAGRSLNPNRVTFKANRPFLVFIREVPLNTIIFMGRVANPCVK

SEQ ID NO: 12 - protein, 418 aa, Homo sapiens
MPSSVSWGILLLAGLCCLVPVSLAEDPQGDAAQKTDTSHHDQDHPTFNKITPNLAEFAFSLYRQLAHQSNSTNIFFSPVSIATAFAMLSLGTKADTHDEILEGLNFNLTEIPEAQIHEGFQELLRTLNQPDSQLQLTTGNGLFLSEGLKLVDKFLEDVKKLYHSEAFTVNFGDTEEAKKQINDYVEKGTQGKIVDLVKELDRDTVFALVNYIFFKGKWERPFEVKDTEEEDFHVDQVTTVKVPMMKRLGMFNIQHCKKLSSWVLLMKYLGNATAIFFLPDEGKLQHLENELTHDIITKFLENEDRRSASLHLPKLSITGTYDLKSVLGQLGITKVFSNGADLSGVTEEAPLKLSKAVHKAVLTIDEKGTEAAGAMFLEAIPMSIPPEVKFNKPFVFLMIEQNTKSPLFMGKVVNPTQK

SEQ ID NO: 13 - protein, 423 aa, Homo sapiens
MERMLPLLALGLLAAGFCPAVLCHPNSPLDEENLTQENQDRGTHVDLGLASANVDFAFSLYKQLVLKAPDKNVIFSPLSISTALAFLSLGAHNTTLTEILKGLKFNLTETSEAEIHQSFQHLLRTLNQSSDELQLSMGNAMFVKEQLSLLDRFTEDAKRLYGSEAFATDFQDSAAAKKLINDYVKNGTRGKITDLIKDLDSQTMMVLVNYIFFKAKWEMPFDPQDTHQSRFYLSKKKWVMVPMMSLHHLTIPYFRDEELSCTVVELKYTGNASALFILPDQDKMEEVEAMLLPETLKRWRDSLEFREIGELYLPKFSISRDYNLNDILLQLGIEEAFTSKADLSGITGARNLAVSQVVHKAVLDVFEEGTEASAATAVKITLLSALVETRTIVRFNRPFLMIIVPTDTQNIFFMSKVTNPKQA

SEQ ID NO: 14 - protein, 485 aa, Homo sapiens
MRKRAPQSEMAPAGVSLRATILCLLAWAGLAAGDRVYIHPFHLVIHNESTCEQLAKANAGKPKDPTFIPAPIQAKTSPVDEKALQDQLVLVAAKLDTEDKLRAAMVGMLANFLGFRIYGMHSELWGVVHGATVLSPTAVFGTLASLYLGALDHTADRLQAILGVPWKDKNCTSRLDAHKVLSALQAVQGLLVAQGRADSQAQLLLSTVVGVFTAPGLHLKQPFVQGLALYTPVVLPRSLDFTELDVAAEKIDRFMQAVTGWKTGCSLMGASVDSTLAFNTYVHFQGKMKGFSLLAEPQEFWVDNSTSVSVPMLSGMGTFQHWSDIQDNFSVTQVPFTESACLLLIQPHYASDLDKVEGLTFQQNSLNWMKKLSPRTIHLTMPQLVLQGSYDLQDLLAQAELPAILHTELNLQKLSNDRIRVGEVLNSIFFELEADEREPTESTQQLNKPEVLEVTLNRPFLFAVYDQSATALHFLGRVANPLSTA

SEQ ID NO: 15 - protein, 1474 aa, Homo sapiens
MGKNKLLHPSLVLLLLVLLPTDASVSGKPQYMVLVPSLLHTETTEKGCVLLSYLNETVTVSASLESVRGNRSLFTDLEAENDVLHCVAFAVPKSSSNEEVMFLTVQVKGPTQEFKKRTTVMVKNEDSLVFVQTDKSIYKPGQTVKFRVVSMDENFHPLNELIPLVYIQDPKGNRIAQWQSFQLEGGLKQFSFPLSSEPFQGSYKVVVQKKSGGRTEHPFTVEEFVLPKFEVQVTVPKIITILEEEMNVSVCGLYTYGKPVPGHVTVSICRKYSDASDCHGEDSQAFCEKFSGQLNSHGCFYQQVKTKVFQLKRKEYEMKLHTEAQIQEEGTVVELTGRQSSEITRTITKLSFVKVDSHFRQGIPFFGQVRLVDGKGVPIPNKVIFIRGNEANYYSNATTDEHGLVQFSINTTNVMGTSLTVRVNYKDRSPCYGYQWVSEEHEEAHHTAYLVFSPSKSFVHLEPMSHELPCGHTQTVQAHYILNGGTLLGLKKLSFYYLIMAKGGIVRTGTHGLLVKQEDMKGHFSISIPVKSDIAPVARLLIYAVLPTGDVIGDSAKYDVENCLANKVDLSFSPSQSLPASHAHLRVTAAPQSVCALRAVDQSVLLMKPDAELSASSVYNLLPEKDLTGFPGPLNDQDNEDCINRHNVYINGITYTPVSSTNEKDMYSFLEDMGLKAFTNSKIRKPKMCPQLQQYEMHGPEGLRVGFYESDVMGRGHARLVHVEEPHTETVRKYFPETWIWDLVVVNSAGVAEVGVTVPDTITEWKAGAFCLSEDAGLGISSTASLRAFQPFFVELTMPYSVIRGEAFTLKATVLNYLPKCIRVSVQLEASPAFLAVPVEKEQAPHCICANGRQTVSWAVTPKSLGNVNFTVSAEALESQELCGTEVPSVPEHGRKDTVIKPLLVEPEGLEKETTFNSLLCPSGGEVSEELSLKLPPNVVEESARASVSVLGDILGSAMQNTQNLLQMPYGCGEQNMVLFAPNIYVLDYLNETQQLTPEIKSKAIGYLNTGYQRQLNYKHYDGSYSTFGERYGRNQGNTWLTAFVLKTFAQARAYIFIDEAHITQALIWLSQRQKDNGCFRSSGSLLNNAIKGGVEDEVTLSAYITIALLEIPLTVTHPVVRNALFCLESAWKTAQEGDHGSHVYTKALLAYAFALAGNQDKRKEVLKSLNEEAVKKDNSVHWERPQKPKAPVGHFYEPQAPSAEVEMTSYVLLAYLTAQPAPTSEDLTSATNIVKWITKQQNAQGGFSSTQDTVVALHALSKYGAATFTRTGKAAQVTIQSSGTFSSKFQVDNNNRLLLQQVSLPELPGEYSMKVTGEGCVYLQTSLKYNILPEKEEFPFALGVQTLPQTCDEPKAHTSFQISLSVSYTGSRSASNMAIVDVKMVSGFIPLKPTVKMLERSNHVSRTEVSSNHVLIYLDKVSNQTLSLFFTVLQDVPVRDLKPAIVKVYDYYETDEFAIAEYNAPCSKDLGNA

SEQ ID NO: 16 - protein, 1663 aa, Homo sapiens
MGPTSGPSLLLLLLTHLPLALGSPMYSIITPNILRLESEETMVLEAHDAQGDVPVTVTVHDFPGKKLVLSSEKTVLTPATNHMGNVTFTIPANREFKSEKGRNKFVTVQATFGTQVVEKVVLVSLQSGYLFIQTDKTIYTPGSTVLYRIFTVNHKLLPVGRTVMVNIENPEGIPVKQDSLSSQNQLGVLPLSWDIPELVNMGQWKIRAYYENSPQQVFSTEFEVKEYVLPSFEVIVEPTEKFYYIYNEKGLEVTITARFLYGKKVEGTAFVIFGIQDGEQRISLPESLKRIPIEDGSGEVVLSRKVLLDGVQNPRAEDLVGKSLYVSATVILHSGSDMVQAERSGIPIVTSPYQIHFTKTPKYFKPGMPFDLMVFVTNPDGSPAYRVPVAVQGEDTVQSLTQGDGVAKLSINTHPSQKPLSITVRTKKQELSEAEQATRTMQALPYSTVGNSNNYLHLSVLRTELRPGETLNVNFLLRMDRAHEAKIRYYTYLIMNKGRLLKAGRQVREPGQDLVVLPLSITTDFIPSFRLVAYYTLIGASGQREVVADSVWVDVKDSCVGSLVVKSGQSEDRQPVPGQQMTLKIEGDHGARVVLVAVDKGVFVLNKKNKLTQSKIWDVVEKADIGCTPGSGKDYAGVFSDAGLTFTSSSGQQTAQRAELQCPQPAARRRRSVQLTEKRMDKVGKYPKELRKCCEDGMRENPMRFSCQRRTRFISLGEACKKVFLDCCNYITELRRQHARASHLGLARSNLDEDIIAEENIVSRSEFPESWLWNVEDLKEPPKNGISTKLMNIFLKDSITTWEILAVSMSDKKGICVADPFEVTVMQDFFIDLRLPYSVVRNEQVEIRAVLYNYRQNQELKVRVELLHNPAFCSLATTKRRHQQTVTIPPKSSLSVPYVIVPLKTGLQEVEVKAAVYHHFISDGVRKSLKVVPEGIRMNKTVAVRTLDPERLGREGVQKEDIPPADLSDQVPDTESETRILLQGTPVAQMTEDAVDAERLKHLIVTPSGCGEQNMIGMTPTVIAVHYLDETEQWEKFGLEKRQGALELIKKGYTQQLAFRQPSSAFAAFVKRAPSTWLTAYVVKVFSLAVNLIAIDSQVLCGAVKWLILEKQKPDGVFQEDAPVIHQEMIGGLRNNNEKDMALTAFVLISLQEAKDICEEQVNSLPGSITKAGDFLEANYMNLQRSYTVAIAGYALAQMGRLKGPLLNKFLTTAKDKNRWEDPGKQLYNVEATSYALLALLQLKDFDFVPPVVRWLNEQRYYGGGYGSTQATFMVFQALAQYQKDAPDHQELNLDVSLQLPSRSSKITHRIHWESASLLRSEETKENEGFTVTAEGKGQGTLSVVTMYHAKAKDQLTCNKFDLKVTIKPAPETEKRPQDAKNTMILEICTRYRGDQDATMSILDISMMTGFAPDTDDLKQLANGVDRYISKYELDKAFSDRNTLIIYLDKVSHSEDDCLAFKVHQYFNVELIQPGAVKVYAYYNLEESCTRFYHPEKEDGKLNKLCRDELCRCAEENCFIQKSDDKVTLEERLDKACEPGVDYVYKTRLVKVQLSNDFDEYIMAIEQTIKSGSDEVQVGQQRTFISPIKCREALKLEEKKHYLMWGLSSDFWGEKPNLSYIIGKDTWVEHWPEEDECQDEENQKQCQDLGAFTESMVVFGCPN

SEQ ID NO: 17 - protein, 1676 aa, Homo sapiens
MGLLGILCFLIFLGKTWGQEQTYVISAPKIFRVGASENIVIQVYGYTEAFDATISIKSYPDKKFSYSSGHVHLSSENKFQNSAILTIQPKQLPGGQNPVSYVYLEVVSKHFSKSKRMPITYDNGFLFIHTDKPVYTPDQSVKVRVYSLNDDLKPAKRETVLTFIDPEGSEVDMVEEIDHIGIISFPDFKIPSNPRYGMWTIKAKYKEDFSTTGTAYFEVKEYVLPHFSVSIEPEYNFIGYKNFKNFEITIKARYFYNKVVTEADVYITFGIREDLKDDQKEMMQTAMQNTMLINGIAQVTFDSETAVKELSYYSLEDLNNKYLYIAVTVIESTGGFSEEAEIPGIKYVLSPYKLNLVATPLFLKPGIPYPIKVQVKDSLDQLVGGVPVTLNAQTIDVNQETSDLDPSKSVTRVDDGVASFVLNLPSGVTVLEFNVKTDAPDLPEENQAREGYRAIAYSSLSQSYLYIDWTDNHKALLVGEHLNIIVTPKSPYIDKITHYNYLILSKGKIIHFGTREKFSDASYQSINIPVTQNMVPSSRLLVYYIVTGEQTAELVSDSVWLNIEEKCGNQLQVHLSPDADAYSPGQTVSLNMATGMDSWVALAAVDSAVYGVQRGAKKPLERVFQFLEKSDLGCGAGGGLNNANVFHLAGLTFLTNANADDSQENDEPCKEILRPRRTLQKKIEEIAAKYKHSVVKKCCYDGACVNNDETCEQRAARISLGPRCIKAFTECCVVASQLRANISHKDMQLGRLHMKTLLPVSKPEIRSYFPESWLWEVHLVPRRKQLQFALPDSLTTWEIQGVGISNTGICVADTVKAKVFKDVFLEMNIPYSVVRGEQIQLKGTVYNYRTSGMQFCVKMSAVEGICTSESPVIDHQGTKSSKCVRQKVEGSSSHLVTFTVLPLEIGLHNINFSLETWFGKEILVKTLRVVPEGVKRESYSGVTLDPRGIYGTISRRKEFPYRIPLDLVPKTEIKRILSVKGLLVGEILSAVLSQEGINILTHLPKGSAEAELMSVVPVFYVFHYLETGNHWNIFHSDPLIEKQKLKKKLKEGMLSIMSYRNADYSYSVWKGGSASTWLTAFALRVLGQVNKYVEQNQNSICNSLLWLVENYQLDNGSFKENSQYQPIKLQGTLPVEARENSLYLTAFTVIGIRKAFDICPLVKIDTALIKADNFLLENTLPAQSTFTLAISAYALSLGDKTHPQFRSIVSALKREALVKGNPPIYRFWKDNLQHKDSSVPNTGTARMVETTAYALLTSLNLKDINYVNPVIKWLSEEQRYGGGFYSTQDTINAIEGLTEYSLLVKQLRLSMDIDVSYKHKGALHNYKMTDKNFLGRPVEVLLNDDLIVSTGFGSGLATVHVTTVVHKTSTSEEVCSFYLKIDTQDIEASHYRGYGNSDYKRIVACASYKPSREESSSGSSHAVMDISLPTGISANEEDLKALVEGVDQLFTDYQIKDGHVILQLNSIPSSDFLCVRFRIFELFEVGFLSPATFTVYEYHRPDKQCTMFYSTSNIKIQKVCEGAACKCVEADCGQMQEELDLTISAETRKQTACKPEIAYAYKVSITSITVENVFVKYKATLLDIYKTGEAVAEKDSEITFIKKVTCTNAELVKGRQYLIMGKEALQIKYNFSFRYIYPLDSLTWIEYWPRDTTCSSCQAFLANLDEFAEDIFLNGC

SEQ ID NO: 18 - protein, 377 aa, Homo sapiens
ASTKGPSVFPLAPCSRSTSGGTAALGCLVKDYFPEPVTVSWNSGALTSGVHTFPAVLQSSGLYSLSSVVTVPSSSLGTQTYTCNVNHKPSNTKVDKRVELKTPLGDTTHTCPRCPEPKSCDTPPPCPRCPEPKSCDTPPPCPRCPEPKSCDTPPPCPRCPAPELLGGPSVFLFPPKPKDTLMISRTPEVTCVVVDVSHEDPEVQFKWYVDGVEVHNAKTKPREEQYNSTFRVVSVLTVLHQDWLNGKEYKCKVSNKALPAPIEKTISKTKGQPREPQVYTLPPSREEMTKNQVSLTCLVKGFYPSDIAVEWESSGQPENNYNTTPPMLDSDGSFFLYSKLTVDKSRWQQGNIFSCSVMHEALHNRFTQKSLSLSPGK

SEQ ID NO: 19 - protein, 453 aa, Homo sapiens
GSASAPTLFPLVSCENSPSDTSSVAVGCLAQDFLPDSITFSWKYKNNSDISSTRGFPSVLRGGKYAATSQVLLPSKDVMQGTDEHVVCKVQHPNGNKEKNVPLPVIAELPPKVSVFVPPRDGFFGNPRKSKLICQATGFSPRQIQVSWLREGKQVGSGVTTDQVQAEAKESGPTTYKVTSTLTIKESDWLGQSMFTCRVDHRGLTFQQNASSMCVPDQDTAIRVFAIPPSFASIFLTKSTKLTCLVTDLTTYDSVTISWTRQNGEAVKTHTNISESHPNATFSAVGEASICEDDWNSGERFTCTVTHTDLPSPLKQTISRPKGVALHRPDVYLLPPAREQLNLRESATITCLVTGFSPADVFVQWMQRGQPLSPEKYVTSAPMPEPQAPGRYFAHSILTVSEEEWNTGETYTCVVAHEALPNRVTERTVDKSTGKPTLYNVSLVMSDTAGTCY

SEQ ID NO: 20 - protein, 353 aa, Homo sapiens
ASPTSPKVFPLSLCSTQPDGNVVIACLVQGFFPQEPLSVTWSESGQGVTARNFPPSQDASGDLYTTSSQLTLPATQCLAGKSVTCHVKHYTNPSQDVTVPCPVPSTPPTPSPSTPPTPSPSCCHPRLSLHRPALEDLLLGSEANLTCTLTGLRDASGVTFTWTPSSGKSAVQGPPERDLCGCYSVSSVLPGCAEPWNHGKTFTCTAAYPESKTPLTATLSKSGNTFRPEVHLLPPPSEELALNELVTLTCLARGFSPKDVLVRWLQGSQELPREKYLTWASRQEPSQGTTTFAVTSILRVAAEDWKKGDTFSCMVGHEALPLAFTQKTIDRLAGKPTHVNVSVVMAEVDGTCY

SEQ ID NO: 21 - protein, 267 aa, Homo sapiens
MKAAVLTLAVLFLTGSQARHFWQQDEPPQSPWDRVKDLATVYVDVLKDSGRDYVSQFEGSALGKQLNLKLLDNWDSVTSTFSKLREQLGPVTQEFWDNLEKETEGLRQEMSKDLEEVKAKVQPYLDDFQKKWQEEMELYRQKVEPLRAELQEGARQKLHELQEKLSPLGEEMRDRARAHVDALRTHLAPYSDELRQRLAARLEALKENGGARLAEYHAKATEHLSTLSEKAKPALEDLRQGLLPVLESFKVSFLSALEEYTKKLNTQ

SEQ ID NO: 22 - protein, 317 aa, Homo sapiens [sequence omitted]

SEQ ID NO: 23 - protein, 100 aa, Homo sapiens
MKLLAATVLLLTICSLEGALVRRQAKEPCVESLVSQYFQTVTDYGKDLMEKVKSPELQAEAKSYFEKSKEQLTPLIKKAGTELVNFLSYFVELGTQPATQ

SEQ ID NO: 24 - protein, 83 aa, Homo sapiens
MRLFLSLPVLVVVLSIVLEGPAPAQGTPDVSSALDKLKEFGNTLEDKARELISRIKQSELSAKMREWFSETFQKVKEKLKIDS

SEQ ID NO: 25 - protein, 101 aa, Homo sapiens
MGTRLLPALFLVLLVLGFEVQGTQQPQQDEMPSPTFLTQVKESLSSYWESAKTAAQNLYEKTYLPAVDEKLRDLYSKSTAAMSTYTGIFTDQVLSVLKGEE

SEQ ID NO: 26 - protein, 99 aa, Homo sapiens
MQPRVLLVVALLALLASARASEAEDASLLSFMQGYMKHATKTAKDALSSVQESQVAQQARGWVTDGFSSLKDYWSTVKDKFSEFWDLDPEVRPTSAVAA

SEQ ID NO: 27 - protein, 866 aa, Homo sapiens
MFSMRIVCLVLSVVGTAWTADSGEGDFLAEGGGVRGPRVVERHQSACKDSDWPFCSDEDWNYKCPSGCRMKGLIDEVNQDFTNRINKLKNSLFEYQKNNKDSHSLTTNIMEILRGDFSSANNRDNTYNRVSEDLRSRIEVLKRKVIEKVQHIQLLQKNVRAQLVDMKRLEVDIDIKIRSCRGSCSRALAREVDLKDYEDQQKQLEQVIAKDLLPSRDRQHLPLIKMKPVPDLVPGNFKSQLQKVPPEWKALTDMPQMRMELERPGGNEITRGGSTSYGTGSETESPRNPSSAGSWNSGSSGPGSTGNRNPGSSGTGGTATWKPGSSGPGSTGSWNSGSSGTGSTGNQNPGSPRPGSTGTWNPGSSERGSAGHWTSESSVSGSTGQWHSESGSFRPDSPGSGNARPNNPDWGTFEEVSGNVSPGTRREYHTEKLVTSKGDKELRTGKEKVTSGSTTTTRRSCSKTVTKTVIGPDGHKEVTKEVVTSEDGSDCPEAMDLGTLSGIGTLDGFRHRHPDEAAFFDTASTGKTFPGFFSPMLGEFVSETESRGSESGIFTNTKESSSHHPGIAEFPSRGKSSSYSKQFTSSTSYNRGDSTFESKSYKMADEAGSEADHEGTHSTKRGHAKSRPVRDCDDVLQTHPSGTQSGIFNIKLPGSSKIFSVYCDQETSLGGWLLIQQRMDGSLNFNRTWQDYKRGFGSLNDEGEGEFWLGNDYLHLLTQRGSVLRVELEDWAGNEAYAEYHFRVGSEAEGYALQVSSYEGTAGDALIEGSVEEGAEYTSHNNMQFSTFDRDADQWEENCAEVYGGGWWYNNCQAANLNGIYYPGGSYDPRNNSPYEIENGVVWVSFRGADYSLRAVRMKIRPLVTQ

SEQ ID NO: 28 - protein, 224 aa, Homo sapiens
MEKLLCFLVLTSLSHAFGQTDMSRKAFVFPKESDTSYVSLKAPLTKPLKAFTVCLHFYTELSSTRGYSIFSYATKRQDNEILIFWSKDIGYSFTVGGSEILFEVPEVTVAPVHICTSWESASGIVEFWVDGKPRVRKSLKKGYTVGAEASIILGQEQDSFGGNFEGSQSLVGDIGNVNMWDFVLSPDEINTIYLGGPFSPNVLNWRALKYEVQGEVFTKPQLWP

SEQ ID NO: 29 - protein, 253 aa, Homo sapiens
MMMKIPWGSIPVLMLLLLLGLIDISQAQLSCTGPPAIPGIPGIPGTPGPDGQPGTPGIKGEKGLPGLAGDHGEFGEKGDPGIPGNPGKVGPKGPMGPKGGPGAPGAPGPKGESGDYKATQKIAFSATRTINVPLRRDQTIRFDHVITNMNNNYEPRSGKFTCKVPGLYYFTYHASSRGNLCVNLMRGRERAQKVVTFCDYAYNTFQVTTGGMVLKLEQGENVFLQATDKNSLLGMEGANSIFSGFLLFPDMEA

SEQ ID NO: 30 - protein, 245 aa, Homo sapiens
MDVGPSSLPHLGLKLLLLLLLLPLRGQANTGCYGIPGMPGLPGAPGKDGYDGLPGPKGEPGIPAIPGIRGPKGQKGEPGLPGHPGKNGPMGPPGMPGVPGPMGIPGEPGEEGRYKQKFQSVFTVTRQTHQPPAPNSLIRFNAVLTNPQGDYDTSTGKFTCKVPGLYYFVYHASHTANLCVLLYRSGVKVVTFCGHTSKTNQVNSGGVLLRLQVGEEVWLAVNDYYDMVGIQGSDSVFSGFLLFPD

SEQ ID NO: 31 - protein, 559 aa, Homo sapiens
MSACRSFAVAICILEISILTAQYTTSYDPELTESSGSASHIDCRMSPWSEWSQCDPCLRQMFRSRSIEVFGQFNGKRCTDAVGDRRQCVPTEPCEDAEDDCGNDFQCSTGRCIKMRLRCNGDNDCGDFSDEDDCESEPRPPCRDRVVEESELARTAGYGINILGMDPLSTPFDNEFYNGLCNRDRDGNTLTYYRRPWNVASLIYETKGEKNFRTEHYEEQIEAFKSIIQEKTSNFNAAISLKFTPTETNKAEQCCEETASSISLHGKGSFRFSYSKNETYQLFLSYSSKKEKMFLHVKGEIHLGRFVMRNRDVVLTTTFVDDIKALPTTYEKGEYFAFLETYGTHYSSSGSLGGLYELIYVLDKASMKRKGVELKDIKRCLGYHLDVSLAFSEISVGAEFNKDDCVKRGEGRAVNITSENLIDDVVSLIRGGTRKYAFELKEKLLRGTVIDVTDFVNWASSINDAPVLISQKLSPIYNLVPVKMKNAHLKKQNLERAIEDYINEFSVRKCHTCQNGGTVILMDGKCLCACPFKFEGIACEISKQKISEGLPALEFPNEK

SEQ ID NO: 32 - protein, 347 aa, Homo sapiens
MSSWSRQRPKSPGGIQPHVSRTLFLLLLLAASAWGVTLSPKDCQVFRSDHGSSISCQPPAEIPGYLPADTVHLAVEFFNLTHLPANLLQGASKLQELHLSSNGLESLSPEFLRPVPQLRVLDLTRNALTGLPPGLFQASATLDTLVLKENQLEVLEVSWLHGLKALGHLDLSGNRLRKLPPGLLANFTLLRTLDLGENQLETLPPDLLRGPLQLERLHLEGNKLQVLGKDLLLPQPDLRYLFLNGNKLARVAAGAFQGLRQLDMLDLSNNSLASVPEGLWASLGQPNWDMRDGFDISGNPWICDQNLSDLYRWLQAQKDKMFSQNDTRCAGPEAVKGQTLLAVAKSQ

SEQ ID NO: 33 - protein, 352 aa, Homo sapiens
MRSLGALLLLLSACLAVSAGPVPTPPDNIQVQENFNISRIYGKWYNLAIGSTCPWLKKIMDRMTVSTLVLGEGATEAEISMTSTRWRKGVCEETSGAYEKTDTDGKFLYHKSKWNITMESYVVHTNYDEYAIFLTKKFSRHHGPTITAKLYGRAPQLRETLLQDFRVVAQGVGIPEDSIFTMADRGECVPGEQEPEPILIPRVRRAVLPQEEEGSGGGQLVTEVTKKEDSCQLGYSAGPCMGMTSRYFYNGTSMACETFQYGGCMGNGNNFVTEKECLQTCRTVAACNLPIVRGPCRAFIQLWAFDAVKGKCVLFPYGGCQGNGNKFYSEKECREYCGVPGDGDEELLRFSN

SEQ ID NO: 34 - protein, 201 aa, Homo sapiens
MALSWVLTVLSLLPLLEAQIPLCANLVPVPITNATLDQITGKWFYIASAFRNEEYNKSVQEIQATFFYFTPNKTEDTIFLREYQTRQDQCIYNTTYLNVQRENGTISRYVGGQEHFAHLLILRDTKTYMLAFDVNDEKNWGLSVYADKPETTKEQLGEFYEALDCLRIPKSDVVYTDWKKDKCEPLEKQHEKERKQEEGES

SEQ ID NO: 35 - protein, 367 aa, Homo sapiens
MKSLVLLLCLAQLWGCHSAPHGPGLIYRQPNCDDPETEEAALVAIDYINQNLPWGYKHTLNQIDEVKVWPQQPSGELFEIEIDTLETTCHVLDPTPVARCSVRQLKEHAVEGDCDFQLLKLDGKFSVVYAKCDSSPDSAEDVRKVCQDCPLLAPLNDTRVVHAAKAALAAFNAQNNGSNFQLEEISRAQLVPLPPSTYVEFTVSGTDCVAKEATEAAKCNLLAEKQYGFCKATLSEKLGGAEVAVTCTVFQTQPVTSQPQPEGANEAVPTPVVDPDAPPSPPLGAPGLPPAGSPPDSHVLLAAPPGHQLHRAHYDLRHTFMGVVSLGSPSGEVSHPRKTRTVVQPSVGAAAGPVVPPCPGRIRHFKV

SEQ ID NO: 36 - protein, 609 aa, Homo sapiens [sequence omitted]

SEQ ID NO: 37 - protein, 474 aa, Homo sapiens [sequence omitted]

SEQ ID NO: 38 - protein, 698 aa, Homo sapiens
MRLAVGALLVCAVLGLCLAVPDKTVRWCAVSEHEATKCQSFRDHMKSVIPSDGPSVACVKKASYLDCIRAIAANEADAVTLDAGLVYDAYLAPNNLKPVVAEFYGSKEDPQTFYYAVAVVKKDSGFQMNQLRGKKSCHTGLGRSAGWNIPIGLLYCDLPEPRKPLEKAVANFFSGSCAPCADGTDFPQLCQLCPGCGCSTLNQYFGYSGAFKCLKDGAGDVAFVKHSTIFENLANKADRDQYELLCLDNTRKPVDEYKDCHLAQVPSHTVVARSMGGKEDLIWELLNQAQEHFGKDKSKEFQLFSSPHGKDLLFKDSAHGFLKVPPRMDAKMYLGYEYVTAIRNLREGTCPEAPTDECKPVKWCALSHHERLKCDEWSVNSVGKIECVSAETTEDCIAKIMNGEADAMSLDGGFVYIAGKCGLVPVLAENYNKSDNCEDTPEAGYFAIAVVKKSASDLTWDNLKGKKSCHTAVGRTAGWNIPMGLLYNKINHCRFDEFFSEGCAPGSKKDSSLCKLCMGSGLNLCEPNNKEGYYGYTGAFRCLVEKGDVAFVKHQTVPQNTGGKNPDPWAKNLNEKDYELLCLDGTRKPVEEYANCHLARAPNHAVVTRKDKEACVHKILRQQQHLFGSNVTDCSGNFCLFRSETKDLLFRDDTVCLAKLHDRNTYEKYLGEEYVKAVGNLRKCSTSSLLEACTFRRP

SEQ ID NO: 39 - protein, 462 aa, Homo sapiens
MARVLGAPVALGLWSLCWSLAIATPLPPTSAHGNVAEGETKPDPDVTERCSDGWSFDATTLDDNGTMLFFKGEFVWKSHKWDRELISERWKNFPSPVDAAFRQGHNSVFLIKGDKVWVYPPEKKEKGYPKLLQDEFPGIPSPLDAAVECHRGECQAEGVLFFQGDREWFWDLATGTMKERSWPAVGNCSSALRWLGRYYCFQGNQFLRFDPVRGEVPPRYPRDVRDYFMPCPGRGHGHRNGTGHGNSTHHGPEYMRCSPHLVLSALTSDNHGATYAFSGTHYWRLDTSRDGWHSWPIAHQWPQGPSAVDAAFSWEEKLYLVQGTQVYVFLTKGGYTLVSGYPKRLEKEVGTPHGIILDSVDAAFICPGSSRLHIMAGRRLWWLDLKSGAQATWTELPWPHEKVDGALCMEKSLGPNSCSANGPGLYLIHGPNLYCYSDVEKLNAAKALPQPQNVTSLLGCTH

SEQ ID NO: 40 - protein, 638 aa, Homo sapiens
MILFKQATYFISLFATVSCGCLTQLYENAFFRGGDVASMYTPNAQYCQMRCTFHPRCLLFSFLPASSINDMEKRFGCFLKDSVTGTLPKVHRTGAVSGHSLKQCGHQISACHRDIYKGVDMRGVNFNVSKVSSVEECQKRCTNNIRCQFFSYATQTFHKAEYRNNCLLKYSPGGTPTAIKVLSNVESGFSLKPCALSEIGCHMNIFQHLAFSDVDVARVLTPDAFVCRTICTYHPNCLFFTFYTNVWKIESQRNVCLLKTSESGTPSSSTPQENTISGYSLLTCKRTLPEPCHSKIYPGVDFGGEELNVTFVKGVNVCQETCTKMIRCQFFTYSLLPEDCKEEKCKCFLRLSMDGSPTRIAYGTQGSSGYSLRLCNTGDNSVCTTKTSTRIVGGTNSSWGEWPWQVSLQVKLTAQRHLCGGSLIGHQWVLTAAHCFDGLPLQDVWRIYSGILNLSDITKDTPFSQIKEIIIHQNYKVSEGNHDIALIKLQAPLNYTEFQKPICLPSKGDTSTIYTNCWVTGWGFSKEKGEIQNILQKVNIPLVTNEECQKRYQDYKITQRMVCAGYKEGGKDACKGDSGGPLVCKHNGMWRLVGITSWGEGCARREQPGVYTKVAEYMDWILEKTQSSDGKAQMQSPA

SEQ ID NO: 41 - protein, 597 aa, Homo sapiens
MHPPKTPSGALHRKRKMAAWPFSRLWKVSDPILFQMTLIAALLPAVLGNCGPPPTLSFAAPMDITLTETRFKTGTTLKYTCLPGYVRSHSTQTLTCNSDGEWVYNTFCIYKRCRHPGELRNGQVEIKTDLSFGSQIEFSCSEGFFLIGSTTSRCEVQDRGVGWSHPLPQCEIVKCKPPPDIRNGRHSGEENFYAYGFSVTYSCDPRFSLLGHASISCTVENETIGVWRPSPPTCEKITCRKPDVSHGEMVSGFGPIYNYKDTIVFKCQKGFVLRGSSVIHCDADSKWNPSPPACEPNSCINLPDIPHASWETYPRPTKEDVYVVGTVLRYRCHPGYKPTTDEPTTVICQKNLRWTPYQGCEALCCPEPKLNNGEITQHRKSRPANHCVYFYGDEISFSCHETSRFSAICQGDGTWSPRTPSCGDICNFPPKIAHGHYKQSSSYSFFKEEIIYECDKGYILVGQAKLSCSYSHWSAPAPQCKALCRKPELVNGRLSVDKDQYVEPENVTIQCDSGYGVVGPQSITCSGNRTWYPEVPKCEWETPEGCEQVLTGKRLMQCLPNPEDVKMALEVYKLSLEIEQLELQRDSARQSTLDKEL

SEQ ID NO: 42 - protein, 478 aa, Homo sapiens
MAPLRPLLILALLAWVALADQESCKGRCTEGFNVDKKCQCDELCSYYQSCCTDYTAECKPQVTRGDVFTMPEDEYTVYDDGEEKNNATVHEQVGGPSLTSDLQAQSKGNPEQTPVLKPEEEAPAPEVGASKPEGIDSRPETLHPGRPQPPAEEELCSGKPFDAFTDLKNGSLFAFRGQYCYELDEKAVRPGYPKLIRDVWGIEGPIDAAFTRINCQGKTYLFKGSQYWRFEDGVLDPDYPRNISDGFDGIPDNVDAALALPAHSYSGRERVYFFKGKQYWEYQFQHQPSQEECEGSSLSAVFEHFAMMQRDSWEDIFELLFWGRTSAGTRQPQFISRDWHGVPGQVDAAMAGRIYISGMAPRPSLAKKQRFRHRNRKGYRSQRGHSRGRNQNSRRPSRATWLSLFSSEESNLGANNYDDYRMDWLVPATCEPIQSVFFFSGDKYYRVNLRTRRVDTVDPPYPRSIAQYWLGCPAPGHL

SEQ ID NO: 43 - protein, 4563 aa, Homo sapiens
MDPPRPALLALLALPALLLLLLAGARAEEEMLENVSLVCPKDATRFKHLRKYTYNYEAESSSGVPGTADSRSATRINCKVELEVPQLCSFILKTSQCTLKEVYGFNPEGKALLKKTKNSEEFAAAMSRYELKLAIPEGKQVFLYPEKDEPTYILNIKRGIISALLVPPETEEAKQVLFLDTVYGNCSTHFTVKTRKGNVATEISTERDLGQCDRFKPIRTGISPLALIKGMTRPLSTLISSSQSCQYTLDAKRKHVAEAICKEQHLFLPFSYKNKYGMVAQVTQTLKLEDTPKINSRFFGEGTKKMGLAFESTKSTSPPKQAEAVLKTLQELKKLTISEQNIQRANLFNKLVTELRGLSDEAVTSLLPQLIEVSSPITLQALVQCGQPQCSTHILQWLKRVHANPLLIDVVTYLVALIPEPSAQQLREIFNMARDQRSRATLYALSHAVNNYHKTNPTGTQELLDIANYLMEQIQDDCTGDEDYTYLILRVIGNMGQTMEQLTPELKSSILKCVQSTKPSLMIQKAAIQALRKMEPKDKDQEVLLQTFLDDASPGDKRLAAYLMLMRSPSQADINKIVQILPWEQNEQVKNFVASHIANILNSEELDIQDLKKLVKEALKESQLPTVMDFRKFSRNYQLYKSVSLPSLDPASAKIEGNLIFDPNNYLPKESMLKTTLTAFGFASADLIEIGLEGKGFEPTLEALFGKQGFFPDSVNKALYWVNGQVPDGVSKVLVDHFGYTKDDKHEQDMVNGIMLSVEKLIKDLKSKEVPEARAYLRILGEELGFASLHDLQLLGKLLLMGARTLQGIPQMIGEVIRKGSKNDFFLHYIFMENAFELPTGAGLQLQISSSGVIAPGAKAGVKLEVANMQAELVAKPSVSVEFVTNMGIIIPDFARSGVQMNTNFFHESGLEAHVALKAGKLKFIIPSPKRPVKLLSGGNTLHLVSTTKTEVIPPLIENRQSWSVCKQVFPGLNYCTSGAYSNASSTDSASYYPLTGDTRLELELRPTGEIEQYSVSATYELQREDRALVDTLKFVTQAEGAKQTEATMTFKYNRQSMTLSSEVQIPDFDVDLGTILRVNDESTEGKTSYRLTLDIQNKKITEVALMGHLSCDTKEERKIKGVISIPRLQAEARSEILAHWSPAKLLLQMDSSATAYGSTVSKRVAWHYDEEKIEFEWNTGTNVDTKKMTSNFPVDLSDYPKSLHMYANRLLDHRVPQTDMTFRHVGSKLIVAMSSWLQKASGSLPYTQTLQDHLNSLKEFNLQNMGLPDFHIPENLFLKSDGRVKYTLNKNSLKIEIPLPFGGKSSRDLKMLETVRTPALHFKSVGFHLPSREFQVPTFTIPKLYQLQVPLLGVLDLSTNVYSNLYNWSASYSGGNTSTDHFSLRARYHMKADSVVDLLSYNVQGSGETTYDHKNTFTLSYDGSLRHKFLDSNIKFSHVEKLGNNPVSKGLLIFDASSSWGPQMSASVHLDSKKKQHLFVKEVKIDGQFRVSSFYAKGTYGLSCQRDPNTGRLNGESNLRFNSSYLQGTNQITGRYEDGTLSLTSTSDLQSGIIKNTASLKYENYELTLKSDTNGKYKNFATSNKMDMTFSKQNALLRSEYQADYESLRFFSLLSGSLNSHGLELNADILGTDKINSGAHKATLRIGQDGISTSATTNLKCSLLVLENELNAELGLSGASMKLTTNGRFREHNAKFSLDGKAALTELSLGSAYQAMILGVDSKNIFNFKVSQEGLKLSNDMMGSYAEMKFDHTNSLNIAGLSLDFSSKLDNIYSSDKFYKQTVNLQLQPYSLVTTLNSDLKYNALDLTNNGKLRLEPLKLHVAGNLKGAYQNNEIKHIYAISSAALSASYKADTVAKVQGVEFSHRLNTDIAGLASAIDMSTNYNSDSLHFSNVFRSVMAPFTMTIDAHTNGNGKLALWGEHTGQLYSKFLLKAEPLAFTFSHDYKGSTSHHLVSRKSISAALEHKVSALLTPAEQTGTWKLKTQFNNNEYSQDLDAYNTKDKIGVELTGRTLADLTLLDSPIKVPLLLSEPINIIDALEMRDAVEKPQEFTIVAFVKYDKNQDVHSINLPFFETLQEYFERNRQTIIVVLENVQRNLKHINIDQFVRKYRAALGKLPQQANDYLNSFNWERQVSHAKEKLTALTKKYRITENDIQIALDDAKINFNEKLSQLQTYMIQFDQYIKDSYDLHDLKIAIANIIDEIIEKLKSLDEHYHIRVNLVKTIHDLHLFIENIDFNKSGSSTASWIQNVDTKYQIRIQIQEKLQQLKRHIQNIDIQHLAGKLKQHIEAIDVRVLLDQLGTTISFERINDILEHVKHFVINLIGDFEVAEKINAFRAKVHELIERYEVDQQIQVLMDKLVELAHQYKLKETIQKLSNVLQQVKIKDYFEKLVGFIDDAVKKLNELSFKTFIEDVNKFLDMLIKKLKSFDYHQFVDETNDKIREVTQRLNGEIQALELPQKAEALKLFLEETKATVAVYLESLQDTKITLIINWLQEALSSASLAHMKAKFRETLEDTRDRMYQMDIQQELQRYLSLVGQVYSTLVTYISDWWTLAAKNLTDFAEQYSIQDWAKRMKALVEQGFTVPEIKTILGTMPAFEVSLQALQKATFQTPDFIVPLTDLRIPSVQINFKDLKNIKIPSRFSTPEFTILNTFHIPSFTIDFVEMKVKIIRTIDQMLNSELQWPVPDIYLRDLKVEDIPLARITLPDFRLPEIAIPEFIIPTLNLNDFQVPDLHIPEFQLPHISHTIEVPTFGKLYSILKIQSPLFTLDANADIGNGTTSANEAGIAASITAKGESKLEVLNFDFQANAQLSNPKINPLALKESVKFSSKYLRTEHGSEMLFFGNAIEGKSNTVASLHTEKNTLELSNGVIVKINNQLTLDSNTKYFHKLNIPKLDFSSQADLRNEIKTLLKAGHIAWTSSGKGSWKWACPRFSDEGTHESQISFTIEGPLTSFGLSNKINSKHLRVNQNLVYESGSLNFSKLEIQSQVDSQHVGHSVLTAKGMALFGEGKAEFTGRHDAHLNGKVIGTLKNSLFFSAQPFEITASTNNEGNLKVRFPLRLTGKIDFLNNYALFLSPSAQQASWQVSARFNQYKYNQNFSAGNNENIMEAHVGINGEANLDFLNIPLTIPEMRLPYTIITTPPLKDFSLWEKTGLKEFLKTTKQSFDLSVKAQYKKNKHRHSITNPLAVLCEFISQSIKSFDRHFEKNRNNALDFVTKSYNETKIKFDKYKAEKSHDELPRTFQIPGYTVPVVNVEVSPFTIEMSAFGYVFPKAVSMPSFSILGSDVRVPSYTLILPSLELPVLHVPRNLKLSLPDFKELCTISHIFIPAMGNITYDFSFKSSVITLNTNAELFNQSDIVAHLLSSSSSVIDALQYKLEGTTRLTRKRGLKLATALSLSNKFVEGSHNSTVSLTTKNMEVSVATTTKAQIPILRMNFKQELNGNTKSKPTVSSSMEFKYDFNSSMLYSTAKGAVDHKLSLESLTSYFSIESSTKGDVKGSVLSREYSGTIASEANTYLNSKSTRSSVKLQGTSKIDDIWNLEVKENFAGEATLQRIYSLWEHSTKNHLQLEGLFFTNGEHTSKATLELSPWQMSALVQVHASQPSSFHDFPDLGQEVALNANTKNQKIRWKNEVRIHSGSFQSQVELSNDQEKAHLDIAGSLEGHLRFLKNIILPVYDKSLWDFLKLDVTTSIGRRQHLRVSTAFVYTKNPNGYSFSIPVKVLADKFIIPGLKLNDLNSVLVMPTFHVPFTDLQVPSCKLDFREIQIYKKLRTSSFALNLPTLPEVKFPEVDVLTKYSQPEDSLIPFFEITVPESQLTVSQFTLPKSVSDGIAALDLNAVANKIADFELPTIIVPEQTIEIPSIKFSVPAGIVIPSFQALTARFEVDSPVYNATWSASLKNKADYVETVLDSTCSSTVQFLEYELNVLGTHKIEDGTLASKTKGTFAHRDFSAEYEEDGKYEGLQEWEGKAHLNIKSPAFTDLHLRYQKDKKGISTSAASPAVGTVGMDMDEDDDFSKWNFYYSPQSSPDKKLTIFKTELRVRESDEETQIKVNWEEEAASGLLTSLKDNVPKATGVLYDYVNKYHWEHTGLTLREVSSKLRRNLQNNAEWVYQGAIRQIDDIDVRFQKAASGTTGTYQEWKDKAQNLYQELLTQEGQASFQGLKDNVFDGLVRVTQEFHMKVKHLIDSLIDFLNFPRFQFPGKPGIYTREELCTMFIREVGTVLSQVYSKVHNGSEILFSYFQDLVITLPFELRKHKLIDVISMYRELLKDLSKEAQEVFKAIQSLKTTEVLRNLQDLLQFIFQLIEDNIKQLKEMKFTYLINYIQDEINTIFSDYIPYVFKLLKENLCLNLHKFNEFIQNELQEASQELQQIHQYIMALREEYFDPSIVGWTVKYYELEEKIVSLIKNLLVALKDFHSEYIVSASNFTSQLSSQVEQFLHRNIQEYLSILTDPDGKGKEKIAELSATAQEIIKSQAIATKKIISDYHQQFRYKLQDFSDQLSDYYEKFIAESKRLIDLSIQNYHTFLIYITELLKKLQSTTVMNPYMKLAPGELTIIL

SEQ ID NO: 44 - protein, 495 aa, Homo sapiens
MSMLVVFLLLWGVTWGPVTEAAIFYETQPSLWAESESLLKPLANVTLTCQAHLETPDFQLFKNGVAQEPVHLDSPAIKHQFLLTGDTQGRYRCRSGLSTGWTQLSKLLELTGPKSLPAPWLSMAPVSWITPGLKTTAVCRGVLRGVTFLLRREGDHEFLEVPEAQEDVEATFPVHQPGNYSCSYRTDGEGALSEPSATVTIEELAAPPPPVLMHHGESSQVLHPGNKVTLTCVAPLSGVDFQLRRGEKELLVPRSSTSPDRIFFHLNAVALGDGGHYTCRYRLHDNQNGWSGDSAPVELILSDETLPAPEFSPEPESGRALRLRCLAPLEGARFALVREDRGGRRVHRFQSPAGTEALFELHNISVADSANYSCVYVDLKPPFGGSAPSERLELHVDGPPPRPQLRATWSGAVLAGRDAVLRCEGPIPDVTFELLREGETKAVKTVRTPGAAANLELIFVGPQHAGNYRCRYRSWVPHTFESELSDPVELLVAES

SEQ ID NO: 45 - protein, 2813 aa, Homo sapiens
MIPARFAGVLLALALILPGTLCAEGTRGRSSTARCSLFGSDFVNTFDGSMYSFAGYCSYLLAGGCQKRSFSIIGDFQNGKRVSLSVYLGEFFDIHLFVNGTVTQGDQRVSMPYASKGLYLETEAGYYKLSGEAYGFVARIDGSGNFQVLLSDRYFNKTCGLCGNFNIFAEDDFMTQEGTLTSDPYDFANSWALSSGEQWCERASPPSSSCNISSGEMQKGLWEQCQLLKSTSVFARCHPLVDPEPFVALCEKTLCECAGGLECACPALLEYARTCAQEGMVLYGWTDHSACSPVCPAGMEYRQCVSPCARTCQSLHINEMCQERCVDGCSCPEGQLLDEGLCVESTECPCVHSGKRYPPGTSLSRDCNTCICRNSQWICSNEECPGECLVTGQSHFKSFDNRYFTFSGICQYLLARDCQDHSFSIVIETVQCADDRDAVCTRSVTVRLPGLHNSLVKLKHGAGVAMDGQDVQLPLLKGDLRIQHTVTASVRLSYGEDLQMDWDGRGRLLVKLSPVYAGKTCGLCGNYNGNQGDDFLTPSGLAEPRVEDFGNAWKLHGDCQDLQKQHSDPCALNPRMTRFSEEACAVLTSPTFEACHRAVSPLPYLRNCRYDVCSCSDGRECLCGALASYAAACAGRGVRVAWREPGRCELNCPKGQVYLQCGTPCNLTCRSLSYPDEECNEACLEGCFCPPGLYMDERGDCVPKAQCPCYYDGEIFQPEDIFSDHHTMCYCEDGFMHCTMSGVPGSLLPDAVLSSPLSHRSKRSLSCRPPMVKLVCPADNLRAEGLECTKTCQNYDLECMSMGCVSGCLCPPGMVRHENRCVALERCPCFHQGKEYAPGETVKIGCNTCVCQDRKWNCTDHVCDATCSTIGMAHYLTFDGLKYLFPGECQYVLVQDYCGSNPGTFRILVGNKGCSHPSVKCKKRVTILVEGGEIELFDGEVNVKRPMKDETHFEVVESGRYIILLLGKALSVVWDRHLSISVVLKQTYQEKVCGLCGNFDGIQNNDLTSSNLQVEEDPVDFGNSWKVSSQCADTRKVPLDSSPATCHNNIMKQTMVDSSCRILTSDVFQDCNKLVDPEPYLDVCIYDTCSCESIGDCACFCDTIAAYAHVCAQHGKVVTWRTATLCPQSCEERNLRENGYECEWRYNSCAPACQVTCQHPEPLACPVQCVEGCHAHCPPGKILDELLQTCVDPEDCPVCEVAGRRFASGKKVTLNPSDPEHCQICHCDVVNLTCEACQEPGGLVVPPTDAPVSPTTLYVEDISEPPLHDFYCSRLLDLVFLLDGSSRLSEAEFEVLKAFVVDMMERLRISQKWVRVAVVEYHDGSHAYIGLKDRKRPSELRRIASQVKYAGSQVASTSEVLKYTLFQIFSKIDRPEASRITLLLMASQEPQRMSRNFVRYVQGLKKKKVIVIPVGIGPHANLKQIRLIEKQAPENKAFVLSSVDELEQQRDEIVSYLCDLAPEAPPPTLPPDMAQVTVGPGLLGVSTLGPKRNSMVLDVAFVLEGSDKIGEADFNRSKEFMEEVIQRMDVGQDSIHVTVLQYSYMVTVEYPFSEAQSKGDILQRVREIRYQGGNRTNTGLALRYLSDHSFLVSQGDREQAPNLVYMVTGNPASDEIKRLPGDIQVVPIGVGPNANVQELERIGWPNAPILIQDFETLPREAPDLVLQRCCSGEGLQIPTLSPAPDCSQPLDVILLLDGSSSFPASYFDEMKSFAKAFISKANIGPRLTQVSVLQYGSITTIDVPWNVVPEKAHLLSLVDVMQREGGPSQIGDALGFAVRYLTSEMHGARPGASKAVVILVTDVSVDSVDAAADAARSNRVTVFPIGIGDRYDAAQLRILAGPAGDSNVVKLQRIEDLPTMVTLGNSFLHKLCSGFVRICMDEDGNEKRPGDVWTLPDQCHTVTCQPDGQTLLKSHRVNCDRGLRPSCPNSQSPVKVEETCGCRWTCPCVCTGSSTRHIVTFDGQNFKLTGSCSYVLFQNKEQDLEVILHNGACSPGARQGCMKSIEVKHSALSVELHSDMEVTVNGRLVSVPYVGGNMEVNVYGAIMHEVRFNHLGHIFTFTPQNNEFQLQLSPKTFASKTYGLCGICDENGANDFMLRDGTVTTDWKTLVQEWTVQRPGQTCQPILEEQCLVPDSSHCQVLLLPLFAECHKVLAPATFYAICQQDSCHQEQVCEVIASYAHLCRTNGVCVDWRTPDFCAMSCPPSLVYNHCEHGCPRHCDGNVSSCGDHPSEGCFCPPDKVMLEGSCVPEEACTQCIGEDGVQHQFLEAWVPDHQPCQICTCLSGRKVNCTTQPCPTAKAPTCGLCEVARLRQNADQCCPEYECVCDPVSCDLPPVPHCERGLQPTLTNPGECRPNFTCACRKEECKRVSPPSCPPHRLPTLRKTQCCDEYECACNCVNSTVSCPLGYLASTATNDCGCTTTTCLPDKVCVHRSTIYPVGQFWEEGCDVCTCTDMEDAVMGLRVAQCSQKPCEDSCRSGFTYVLHEGECCGRCLPSACEVVTGSPRGDSQSSWKSVGSQWASPENPCLINECVRVKEEVFIQQRNVSCPQLEVPVCPSGFQLSCKTSACCPSCRCERMEACMLNGTVIGPGKTVMIDVCTTCRCMVQVGVISGFKLECRKTTCNPCPLGYKEENNTGECCGRCLPTACTIQLRGGQIMTLKRDETLQDGCDTHFCKVNERGEYFWEKRVTGCPPFDEHKCLAEGGKIMKIPGTCCDTCEEPECNDITARLQYVKVGSCKSEVEVDIHYCQGKCASKAMYSIDINDVQDQCSCCSPTRTEPMQVALHCTNGSVVYHEVLNAMECKCSPRKCSK

SEQ ID NO: 46 - protein, 402 aa, Homo sapiens
MESRGPLATSRLLLLLLLLLLRHTRQGWALRPVLPTQSAHDPPAVHLSNGPGQEPIAVMTFDLTKITKTSSSFEVRTWDPEGVIFYGDTNPKDDWFMLGLRDGRPEIQLHNHWAQLTVGAGPRLDDGRWHQVEVKMEGDSVLLEVDGEEVLRLRQVSGPLTSKRHPIMRIALGGLLFPASNLRLPLVPALDGCLRRDSWLDKQAEISASAPTSLRSCDVESNPGIFLPPGTQAEFNLRDIPQPHAEPWAFSLDLGLKQAAGSGHLLALGTPENPSWLSLHLQDQKVVLSSGSGPGLDLPLVLGLPLQLKLSMSRVVLSQGSKMKALALPPLGLAPLLNLWAKPQGRLFLGALPGEDSSTSFCLNGLWAQGQRLDVDQALNRSHEIWTHSCPQSPGNGTDASH

SEQ ID NO: 47 - protein, 406 aa, Homo sapiens
MQLFLLLCLVLLSPQGASLHRHHPREMKKRVEDLHVGATVAPSSRRDFTFDLYRALASAAPSQSIFFSPVSISMSLAMLSLGAGSSTKMQILEGLGLNLQKSSEKELHRGFQQLLQELNQPRDGFQLSLGNALFTDLVVDLQDTFVSAMKTLYLADTFPTNFRDSAGAMKQINDYVAKQTKGKIVDLLKNLDSNAVVIMVNYIFFKAKWETSFNHKGTQEQDFYVTSETVVRVPMMSREDQYHYLLDRNLSCRVVGVPYQGNATALFILPSEGKMQQVENGLSEKTLRKWLKMFKKRQLELYLPKFSIEGSYQLEKVLPSLGISNVFTSHADLSGISNHSNIQVSEMVHKAVVEVDESGTRAAAATGTIFTFRSARLNSQRLVFNRPFLMFIVDNNILFLGKVNRP

SEQ ID NO: 48 - protein, 500 aa, Homo sapiens
MASRLTLLTLLLLLLAGDRASSNPNATSSSSQDPESLQDRGEGKVATTVISKMLFVEPILEVSSLPTTNSTTNSATKITANTTDEPTTQPTTEPTTQPTIQPTQPTTQLPTDSPTQPTTGSFCPGPVTLCSDLESHSTEAVLGDALVDFSLKLYHAFSAMKKVETNMAFSPFSIASLLTQVLLGAGENTKTNLESILSYPKDFTCVHQALKGFTTKGVTSVSQIFHSPDLAIRDTFVNASRTLYSSSPRVLSNNSDANLELINTWVAKNTNNKISRLLDSLPSDTRLVLLNAIYLSAKWKTTFDPKKTRMEPFHFKNSVIKVPMMNSKKYPVAHFIDQTLKAKVGQLQLSHNLSLVILVPQNLKHRLEDMEQALSPSVFKAIMEKLEMSKFQPTLLTLPRIKVTTSQDMLSIMEKLEFFDFSYDLNLCGLTEDPDLQVSAMQHQTVLELTETGVEAAAASAISVARTLLVFEVQQPFLFVLWDQQHKFPVFMGRVYDPRA

SEQ ID NO: 49 - protein, 415 aa, Homo sapiens
MSPFLYLVLLVLGLHATIHCASPEGKVTACHSSQPNATLYKMSSINADFAFNLYRRFTVETPDKNIFFSPVSISAALVMLSFGACCSTQTEIVETLGFNLTDTPMVEIQHGFQHLICSLNFPKKELELQIGNALFIGKHLKPLAKFLNDVKTLYETEVFSTDFSNISAAKQEINSHVEMQTKGKVVGLIQDLKPNTIMVLVNYIHFKAQWANPFDPSKTEDSSSFLIDKTTTVQVPMMHQMEQYYHLVDMELNCTVLQMDYSKNALALFVLPKEGQMESVEAAMSSKTLKKWNRLLQKGWVDLFVPKFSISATYDLGATLLKMGIQHAYSENADFSGLTEDNGLKLSNAAHKAVLHIGEKGTEAAAVPEVELSDQPENTFLHPIIQIDRSFMLLILERSTRSILFLGKVVNPTEA

SEQ ID NO: 50 - protein, 499 aa, Homo sapiens
MKHSLNALLIFLIITSAWGGSKGPLDQLEKGGETAQSADPQWEQLNNKNLSMPLLPADFHKENTVTNDWIPEGEEDDDYLDLEKIFSEDDDYIDIVDSLSVSPTDSDVSAGNILQLFHGKSRIQRLNILNAKFAFNLYRVLKDQVNTFDNIFIAPVGISTAMGMISLGLKGETHEQVHSILHFKDFVNASSKYEITTIHNLFRKLTHRLFRRNFGYTLRSVNDLYIQKQFPILLDFKTKVREYYFAEAQIADFSDPAFISKTNNHIMKLTKGLIKDALENIDPATQMMILNCIYFKGSWVNKFPVEMTHNHNFRLNEREVVKVSMMQTKGNFLAANDQELDCDILQLEYVGGISMLIVVPHKMSGMKTLEAQLTPRVVERWQKSMTNRTREVLLPKFKLEKNYNLVESLKLMGIRMLFDKNGNMAGISDQRIAIDLFKHQGTITVNEEGTQATTVTTVGFMPLSTQVRFTVDRPFLFLIYEHRTSCLLFMGRVANPSRS

SEQ ID NO: 51 - protein, 782 aa, Homo sapiens
MAPHRPAPALLCALSLALCALSLPVRAATASRGASQAGAPQGRVPEARPNSMVVEHPEFLKAGKEPGLQIWRVEKFDLVPVPTNLYGDFFTGDAYVILKTVQLRNGNLQYDLHYWLGNECSQDESGAAAIFTVQLDDYLNGRAVQHREVQGFESATFLGYFKSGLKYKKGGVASGFKHVVPNEVVVQRLFQVKGRRVVRATEVPVSWESFNNGDCFILDLGNNIHQWCGSNSNRYERLKATQVSKGIRDNERSGRARVHVSEEGTEPEAMLQVLGPKPALPAGTEDTAKEDAANRKLAKLYKVSNGAGTMSVSLVADENPFAQGALKSEDCFILDHGKDGKIFVWKGKQANTEERKAALKTASDFITKMDYPKQTQVSVLPEGGETPLFKQFFKNWRDPDQTDGLGLSYLSSHIANVERVPFDAATLHTSTAMAAQHGMDDDGTGQKQIWRIEGSNKVPVDPATYGQFYGGDSYIILYNYRHGGRQGQIIYNWQGAQSTQDEVAASAILTAQLDEELGGTPVQSRVVQGKEPAHLMSLFGGKPMIIYKGGTSREGGQTAPASTRLFQVRANSAGATRAVEVLPKAGALNSNDAFVLKTPSAAYLWVGTGASEAEKTGAQELLRVLRAQPVQVAEGSEPDGFWEALGGKAAYRTSPRLKDKKMDAHPPRLFACSNKIGRFVIEEVPGELMQEDLATDDVMLLDTWDQVFVWVGKDSQEEEKTEALTSAKRYIETDPANRDRRTPITVVKQGFEPPSFVGWFLGWDDDYWSVDPLDRAMAELAA

SEQ ID NO: 52 - protein, 396 aa, Homo sapiens [sequence omitted]

SEQ ID NO: 53 - protein, 584 aa, Homo sapiens
MFAVVFFILSLMTCQPGVTAQEKVNQRVRRAATPAAVTCQLSNWSEWTDCFPCQDKKYRHRSLLQPNKFGGTICSGDIWDQASCSSSTTCVRQAQCGQDFQCKETGRCLKRHLVCNGDQDCLDGSDEDDCEDVRAIDEDCSQYEPIPGSQKAALGYNILTQEDAQSVYDASYYGGQCETVYNGEWRELRYDSTCERLYYGDDEKYFRKPYNFLKYHFEALADTGISSEFYDNANDLLSKVKKDKSDSFGVTIGIGPAGSPLLVGVGVSHSQDTSFLNELNKYNEKKFIFTRIFTKVQTAHFKMRKDDIMLDEGMLQSLMELPDQYNYGMYAKFINDYGTHYITSGSMGGIYEYILVIDKAKMESLGITSRDITTCFGGSLGIQYEDKINVGGGLSGDHCKKFGGGKTERARKAMAVEDIISRVRGGSSGWSGGLAQNRSTITYRSWGRSLKYNPVVIDFEMQPIHEVLRHTSLGPLEAKRQNLRRALDQYLMEFNACRCGPCFNNGVPILEGTSCRCQCRLGSLGAACEQTQTEGAKADGSWSCWSSWSVCRAGIQERRRECDNPAPQNGGASCPGRKVQTQAC

SEQ ID NO: 54 - protein, 1039 aa, Homo sapiens
MARALCPLQALWLLEWVLLLLGPCAAPPAWALNLDPVQLTFYAGPNGSQFGFSLDFHKDSHGRVAIVVGAPRTLGPSQEETGGVFLCPWRAEGGQCPSLLFDLRDETRNVGSQTLQTFKARQGLGASVVSWSDVIVACAPWQHWNVLEKTEEAEKTPVGSCFLAQPESGRRAEYSPCRGNTLSRIYVENDFSWDKRYCEAGFSSVVTQAGELVLGAPGGYYFLGLLAQAPVADIFSSYRPGILLWHVSSQSLSFDSSNPEYFDGYWGYSVAVGEFDGDLNTTEYVVGAPTWSWTLGAVEILDSYYQRLHRLRGEQMASYFGHSVAVTDVNGDGRHDLLVGAPLYMESRADRKLAEVGRVYLFLQPRGPHALGAPSLLLTGTQLYGRFGSAIAPLGDLDRDGYNDIAVAAPYGGPSGRGQVLVFLGQSEGLRSRPSQVLDSPFPTGSAFGFSLRGAVDIDDNGYPDLIVGAYGANQVAVYRAQPVVKASVQLLVQDSLNPAVKSCVLPQTKTPVSCFNIQMCVGATGHNIPQKLSLNAELQLDRQKPRQGRRVLLLGSQQAGTTLNLDLGGKHSPICHTTMAFLRDEADFRDKLSPIVLSLNVSLPPTEAGMAPAVVLHGDTHVQEQTRIVLDCGEDDVCVPQLQLTASVTGSPLLVGADNVLELQMDAANEGEGAYEAELAVHLPQGAHYMRALSNVEGFERLICNQKKENETRVVLCELGNPMKKNAQIGIAMLVSVGNLEEAGESVSFQLQIRSKNSQNPNSKIVLLDVPVRAEAQVELRGNSFPASLVVAAEEGEREQNSLDSWGPKVEHTYELHNNGPGTVNGLHLSIHLPGQSQPSDLLYILDIQPQGGLQCFPQPPVNPLKVDWGLPIPSPSPIHPAHHKRDRRQIFLPEPEQPSRLQDPVLVSCDSAPCTVVQCDLQEMARGQRAMVTVLAFLWLPSLYQRPLDQFVLQSHAWFNVSSLPYAVPPLSLPRGEAQVWTQLLRALEERAIPIWWVLVGVLGGLLLLTILVLAMWKVGFFKRNRPPLEEDDEEGE

SEQ ID NO: 55 - protein, 4548 aa, Homo sapiens
MEHKEVVLLLLLFLKSAAPEQSHVVQDCYHGDGQSYRGTYSTTVTGRTCQAWSSMTPHQHNRTTENYPNAGLIMNYCRNPDAVAAPYCYTRDPGVRWEYCNLTQCSDAEGTAVAPPTVTPVPSLEAPSEQAPTEQRPGVQECYHGNGQSYRGTYSTTVTGRTCQAWSSMTPHSHSRTPEYYPNAGLIMNYCRNPDAVAAPYCYTRDPGVRWEYCNLTQCSDAEGTAVAPPTVTPVPSLEAPSEQAPTEQRPGVQECYHGNGQSYRGTYSTTVTGRTCQAWSSMTPHSHSRTPEYYPNAGLIMNYCRNPDAVAAPYCYTRDPGVRWEYCNLTQCSDAEGTAVAPPTVTPVPSLEAPSEQAPTEQRPGVQECYHGNGQSYRGTYSTTVTGRTCQAWSSMTPHSHSRTPEYYPNAGLIMNYCRNPDAVAAPYCYTRDPGVRWEYCNLTQCSDAEGTAVAPPTVTPVPSLEAPSEQAPTEQRPGVQECYHGNGQSYRGTYSTTVTGRTCQAWSSMTPHSHSRTPEYYPNAGLIMNYCRNPDAVAAPYCYTRDPGVRWEYCNLTQCSDAEGTAVAPPTVTPVPSLEAPSEQAPTEQRPGVQECYHGNGQSYRGTYSTTVTGRTCQAWSSMTPHSHSRTPEYYPNAGLIMNYCRNPDAVAAPYCYTRDPGVRWEYCNLTQCSDAEGTAVAPPTVTPVPSLEAPSEQAPTEQRPGVQECYHGNGQSYRGTYSTTVTGRTCQAWSSMTPHSHSRTPEYYPNAGLIMNYCRNPDAVAAPYCYTRDPGVRWEYCNLTQCSDAEGTAVAPPTVTPVPSLEAPSEQAPTEQRPGVQECYHGNGQSYRGTYSTTVTGRTCQAWSSMTPHSHSRTPEYYPNAGLIMNYCRNPDAVAAPYCYTRDPGVRWEYCNLTQCSDAEGTAVAPPTVTPVPSLEAPSEQAPTEQRPGVQECYHGNGQSYRGTYSTTVTGRTCQAWSSMTPHSHSRTPEYYPNAGLIMNYCRNPDAVAAPYCYTRDPGVRWEYCNLTQCSDAEGTAVAPPTVTPVPSLEAPSEQAPTEQRPGVQECYHGNGQSYRGTYSTTVTGRTCQAWSSMTPHSHSRTPEYYPNAGLIMNYCRNPDAVAAPYCYTRDPGVRWEYCNLTQCSDAEGTAVAPPTVTPVPSLEAPSEQAPTEQRPGVQECYHGNGQSYRGTYSTTVTGRTCQAWSSMTPHSHSRTPEYYPNAGLIMNYCRNPDAVAAPYCYTRDPGVRWEYCNLTQCSDAEGTAVAPPTVTPVPSLEAPSEQAPTEQRPGVQECYHGNGQSYRGTYSTTVTGRTCQAWSSMTPHSHSRTPEYYPNAGLIMNYCRNPDAVAAPYCYTRDPGVRWEYCNLTQCSDAEGTAVAPPTVTPVPSLEAPSEQAPTEQRPGVQECYHGNGQSYRGTYSTTVTGRTCQAWSSMTPHSHSRTPEYYPNAGLIMNYCRNPDAVAAPYCYTRDPGVRWEYCNLTQCSDAEGTAVAPPTVTPVPSLEAPSEQAPTEQRPGVQECYHGNGQSYRGTYSTTVTGRTCQAWSSMTPHSHSRTPEYYPNAGLIMNYCRNPDAVAAPYCYTRDPGVRWEYCNLTQCSDAEGTAVAPPTVTPVPSLEAPSEQAPTEQRPGVQECYHGNGQSYRGTYSTTVTGRTCQAWSSMTPHSHSRTPEYYPNAGLIMNYCRNPDAVAAPYCYTRDPGVRWEYCNLTQCSDAEGTAVAPPTVTPVPSLEAPSEQAPTEQRPGVQECYHGNGQSYRGTYSTTVTGRTCQAWSSMTPHSHSRTPEYYPNAGLIMNYCRNPDAVAAPYCYTRDPGVRWEYCNLTQCSDAEGTAVAPPTVTPVPSLEAPSEQAPTEQRPGVQECYHGNGQSYRGTYSTTVTGRTCQAWSSMTPHSHSRTPEYYPNAGLIMNYCRNPDAVAAPYCYTRDPGVRWEYCNLTQCSDAEGTAVAPPTVTPVPSLEAPSEQAPTEQRPGVQECYHGNGQSYRGTYSTTVTGRTCQAWSSMTPHSHSRTPEYYPNAGLIMNYCRNPDAVAAPYCYTRDPGVRWEYCNLTQCSDAEGTAVAPPTVTPVPSLEAPSEQAPTEQRPGVQECYHGNGQSYRGTYSTTVTGRTCQAWSSMTPHSHSRTPEYYPNAGLIMNYCRNPDAVAAPYCYTRDPGVRWEYCNLTQCSDAEGTAVAPPTVTPVPSLEAPSEQAPTEQRPGVQECYHGNGQSYRGTYSTTVTGRTCQAWSSMTPHSHSRTPEYYPNAGLIMNYCRNPDAVAAPYCYTRDPGVRWEYCNLTQCSDAEGTAVAPPTVTPVPSLEAPSEQAPTEQRPGVQECYHGNGQSYRGTYSTTVTGRTCQAWSSMTPHSHSRTPEYYPNAGLIMNYCRNPDAVAAPYCYTRDPGVRWEYCNLTQCSDAEGTAVAPPTVTPVPSLEAPSEQAPTEQRPGVQECYHGNGQSYRGTYSTTVTGRTCQAWSSMTPHSHSRTPEYYPNAGLIMNYCRNPDAVAAPYCYTRDPGVRWEYCNLTQCSDAEGTAVAPPTVTPVPSLEAPSEQAPTEQRPGVQECYHGNGQSYRGTYSTTVTGRTCQAWSSMTPHSHSRTPEYYPNAGLIMNYCRNPDAVAAPYCYTRDPGVRWEYCNLTQCSDAEGTAVAPPTVTPVPSLEAPSEQAPTEQRPGVQECYHGNGQSYRGTYSTTVTGRTCQAWSSMTPHSHSRTPEYYPNAGLIMNYCRNPDAVAAPYCYTRDPGVRWEYCNLTQCSDAEGTAVAPPTVTPVPSLEAPSEQAPTEQRPGVQECYHGNGQSYRGTYSTTVTGRTCQAWSSMTPHSHSRTPEYYPNAGLIMNYCRNPDAVAAPYCYTRDPGVRWEYCNLTQCSDAEGTAVAPPTVTPVPSLEAPSEQAPTEQRPGVQECYHGNGQSYRGTYSTTVTGRTCQAWSSMTPHSHSRTPEYYPNAGLIMNYCRNPDAVAAPYCYTRDPGVRWEYCNLTQCSDAEGTAVAPPTVTPVPSLEAPSEQAPTEQRPGVQECYHGNGQSYRGTYSTTVTGRTCQAWSSMTPHSHSRTPEYYPNAGLIMNYCRNPDAVAAPYCYTRDPGVRWEYCNLTQCSDAEGTAVAPPTVTPVPSLEAPSEQAPTEQRPGVQECYHGNGQSYRGTYSTTVTGRTCQAWSSMTPHSHSRTPEYYPNAGLIMNYCRNPDAVAAPYCYTRDPGVRWEYCNLTQCSDAEGTAVAPPTVTPVPSLEAPSEQAPTEQRPGVQECYHGNGQSYRGTYSTTVTGRTCQAWSSMTPHSHSRTPEYYPNAGLIMNYCRNPDAVAAPYCYTRDPGVRWEYCNLTQCSDAEGTAVAPPTVTPVPSLEAPSEQAPTEQRPGVQECYHGNGQSYRGTYSTTVTGRTCQAWSSMTPHSHSRTPEYYPNAGLIMNYCRNPDPVAAPYCYTRDPSVRWEYCNLTQCSDAEGTAVAPPTITPIPSLEAPSEQAPTEQRPGVQECYHGNGQSYQGTYFITVTGRTCQAWSSMTPHSHSRTPAYYPNAGLIKNYCRNPDPVAAPWCYTTDPSVRWEYCNLTRCSDAEWTAFVPPNVILAPSLEAFFEQALTEETPGVQDCYYHYGQSYRGTYSTTVTGRTCQAWSSMTPHQHSRTPENYPNAGLTRNYCRNPDAEIRPWCYTMDPSVRWEYCNLTQCLVTESSVLATLTVVPDPSTEASSEEAPTEQSPGVQDCYHGDGQSYRGSFSTTVTGRTCQSWSSMTPHWHQRTTEYYPNGGLTRNYCRNPDAEISPWCYTMDPNVRWEYCNLTQCPVTESSVLATSTAVSEQAPTEQSPTVQDCYHGDGQSYRGSFSTTVTGRTCQSWSSMTPHWHQRTTEYYPNGGLTRNYCRNPDAEIRPWCYTMDPSVRWEYCNLTQCPVMESTLLTTPTVVPVPSTELPSEEAPTENSTGVQDCYRGDGQSYRGTLSTTITGRTCQSWSSMTPHWHRRIPLYYPNAGLTRNYCRNPDAEIRPWCYTMDPSVRWEYCNLTRCPVTESSVLTTPTVAPVPSTEAPSEQAPPEKSPVVQDCYHGDGRSYRGISSTTVTGRTCQSWSSMIPHWHQRTPENYPNAGLTENYCRNPDSGKQPWCYTTDPCVRWEYCNLTQCSETESGVLETPTVVPVPSMEAHSEAAPTEQTPVVRQCYHGNGQSYRGTFSTTVTGRTCQSWSSMTPHRHQRTPENYPNDGLTMNYCRNPDADTGPWCFTMDPSIRWEYCNLTRCSDTEGTVVAPPTVIQVPSLGPPSEQDCMFGNGKGYRGKKATTVTGTPCQEWAAQEPHRHSTFIPGTNKWAGLEKNYCRNPDGDINGPWCYTMNPRKLFDYCDIPLCASSSFDCGKPQVEPKKCPGSIVGGCVAHPHSWPWQVSLRTRFGKHFCGGTLISPEWVLTAAHCLKKSSRPSSYKVILGAHQEVNLESHVQEIEVSRLFLEPTQADIALLKLSRPAVITDKVMPACLPSPDYMVTARTECYITGWGETQGTFGTGLLKEAQLLVIENEVCNHYKYICAEHLARGTDSCQGDSGGPLVCFEKDKYILQGVTSWGLGCARPNKPGVYARVSRFVTWIEGMMRNN

SEQ ID NO: 56 - protein, 1231 aa, Homo sapiens
MRLLAKIICLMLWAICVAEDCNELPPRRNTEILTGSWSDQTYPEGTQAIYKCRPGYRSLGNVIMVCRKGEWVALNPLRKCQKRPCGHPGDTPFGTFTLTGGNVFEYGVKAVYTCNEGYQLLGEINYRECDTDGWTNDIPICEVVKCLPVTAPENGKIVSSAMEPDREYHFGQAVRFVCNSGYKIEGDEEMHCSDDGFWSKEKPKCVEISCKSPDVINGSPISQKIIYKENERFQYKCNMGYEYSERGDAVCTESGWRPLPSCEEKSCDNPYIPNGDYSPLRIKHRTGDEITYQCRNGFYPATRGNTAKCTSTGWIPAPRCTLKPCDYPDIKHGGLYHENMRRPYFPVAVGKYYSYYCDEHFETPSGSYWDHIHCTQDGWSPAVPCLRKCYFPYLENGYNQNYGRKFVQGKSIDVACHPGYALPKAQTTVTCMENGWSPTPRCIRVKTCSKSSIDIENGFISESQYTYALKEKAKYQCKLGYVTADGETSGSITCGKDGWSAQPTCIKSCDIPVFMNARTKNDFTWFKLNDTLDYECHDGYESNTGSTTGSIVCGYNGWSDLPICYERECELPKIDVHLVPDRKKDQYKVGEVLKFSCKPGFTIVGPNSVQCYHFGLSPDLPICKEQVQSCGPPPELLNGNVKEKTKEEYGHSEVVEYYCNPRFLMKGPNKIQCVDGEWTTLPVCIVEESTCGDIPELEHGWAQLSSPPYYYGDSVEFNCSESFTMIGHRSITCIHGVWTQLPQCVAIDKLKKCKSSNLIILEEHLKNKKEFDHNSNIRYRCRGKEGWIHTVCINGRWDPEVNCSMAQIQLCPPPPQIPNSHNMTTTLNYRDGEKVSVLCQENYLIQEGEEITCKDGRWQSIPLCVEKIPCSQPPQIEHGTINSSRSSQESYAHGTKLSYTCEGGFRISEENETTCYMGKWSSPPQCEGLPCKSPPEISHGVVAHMSDSYQYGEEVTYKCFEGFGIDGPAIAKCLGEKWSHPPSCIKTDCLSLPSFENAIPMGEKKDVYKAGEQVTYTCATYYKMDGASNVTCINSRWTGRPTCRDTSCVNPPTVQNAYIVSRQMSKYPSGERVRYQCRSPYEMFGDEEVMCLNGNWTEPPQCKDSTGKCGPPPPIDNGDITSFPLSVYAPASSVEYQCQNLYQLEGNKRITCRNGQWSEPPKCLHPCVISREIMENYNIALRWTAKQKLYSRTGESVEFVCKRGYRLSSRSHTLRTTCWDGKLEYPTCAKR

SEQ ID NO: 57 - protein, 491 aa, Homo sapiens
MALLWGLLVLSWSCLQGPCSVFSPVSAMEPLGRQLTSGPNQEQVSPLTLLKLGNQEPGGQTALKSPPGVCSRDPTPEQTHRLARAMMAFTADLFSLVAQTSTCPNLILSPLSVALALSHLALGAQNHTLQRLQQVLHAGSGPCLPHLLSRLCQDLGPGAFRLAARMYLQKGFPIKEDFLEQSEQLFGAKPVSLTGKQEDDLANINQWVKEATEGKIQEFLSGLPEDTVLLLLNAIHFQGFWRNKFDPSLTQRDSFHLDEQFTVPVEMMQARTYPLRWFLLEQPEIQVAHFPFKNNMSFVVLVPTHFEWNVSQVLANLSWDTLHPPLVWERPTKVRLPKLYLKHQMDLVATLSQLGLQELFQAPDLRGISEQSLVVSGVQHQSTLELSEVGVEAAAATSIAMSRMSLSSFSVNRPFLFFIFEDTTGLPLFVGSVRNPNPSAPRELKEQQDSPGNKDFLQSLKGFPRGDKLFGPDLKLVPPMEEDYPQFGSPK

SEQ ID NO: 58 - protein, 688 aa, Homo sapiens
MWCIVLFSLLAWVYAEPTMYGEILSPNYPQAYPSEVEKSWDIEVPEGYGIHLYFTHLDIELSENCAYDSVQIISGDTEEGRLCGQRSSNNPHSPIVEEFQVPYNKLQVIFKSDFSNEERFTGFAAYYVATDINECTDFVDVPCSHFCNNFIGGYFCSCPPEYFLHDDMKNCGVNCSGDVFTALIGEIASPNYPKPYPENSRCEYQIRLEKGFQVVVTLRREDFDVEAADSAGNCLDSLVFVAGDRQFGPYCGHGFPGPLNIETKSNALDIIFQTDLTGQKKGWKLRYHGDPMPCPKEDTPNSVWEPAKAKYVFRDVVQITCLDGFEVVEGRVGATSFYSTCQSNGKWSNSKLKCQPVDCGIPESIENGKVEDPESTLFGSVIRYTCEEPYYYMENGGGGEYHCAGNGSWVNEVLGPELPKCVPVCGVPREPFEEKQRIIGGSDADIKNFPWQVFFDNPWAGGALINEYWVLTAAHVVEGNREPTMYVGSTSVQTSRLAKSKMLTPEHVFIHPGWKLLEVPEGRTNFDNDIALVRLKDPVKMGPTVSPICLPGTSSDYNLMDGDLGLISGWGRTEKRDRAVRLKAARLPVAPLRKCKEVKVEKPTADAEAYVFTPNMICAGGEKGMDSCKGDSGGAFAVQDPNDKTKFYAAGLVSWGPQCGTYGLYTRVKNYVDWIMKTMQENSTPRED

SEQ ID NO: 59 - protein, 1744 aa, Homo sapiens
MRLLWGLIWASSFFTLSLQKPRLLLFSPSVVHLGVPLSVGVQLQDVPRGQVVKGSVFLRNPSRNNVPCSPKVDFTLSSERDFALLSLQVPLKDAKSCGLHQLLRGPEVQLVAHSPWLKDSLSRTTNIQGINLLFSSRRGHLFLQTDQPIYNPGQRVRYRVFALDQKMRPSTDTITVMVENSHGLRVRKKEVYMPSSIFQDDFVIPDISEPGTWKISARFSDGLESNSSTQFEVKKYVLPNFEVKITPGKPYILTVPGHLDEMQLDIQARYIYGKPVQGVAYVRFGLLDEDGKKTFFRGLESQTKLVNGQSHISLSKAEFQDALEKLNMGITDLQGLRLYVAAAIIESPGGEMEEAELTSWYFVSSPFSLDLSKTKRHLVPGAPFLLQALVREMSGSPASGIPVKVSATVSSPGSVPEVQDIQQNTDGSGQVSIPIIIPQTISELQLSVSAGSPHPAIARLTVAAPPSGGPGFLSIERPDSRPPRVGDTLNLNLRAVGSGATFSHYYYMILSRGQIVFMNREPKRTLTSVSVFVDHHLAPSFYFVAFYYHGDHPVANSLRVDVQAGACEGKLELSVDGAKQYRNGESVKLHLETDSLALVALGALDTALYAAGSKSHKPLNMGKVFEAMNSYDLGCGPGGGDSALQVFQAAGLAFSDGDQWTLSRKRLSCPKEKTTRKKRNVNFQKAINEKLGQYASPTAKRCCQDGVTRLPMMRSCEQRAARVQQPDCREPFLSCCQFAESLRKKSRDKGQAGLQRALEILQEEDLIDEDDIPVRSFFPENWLWRVETVDRFQILTLWLPDSLTTWEIHGLSLSKTKGLCVATPVQLRVFREFHLHLRLPMSVRRFEQLELRPVLYNYLDKNLTVSVHVSPVEGLCLAGGGGLAQQVLVPAGSARPVAFSVVPTAAAAVSLKVVARGSFEFPVGDAVSKVLQIEKEGAIHREELVYELNPLDHRGRTLEIPGNSDPNMIPDGDFNSYVRVTASDPLDTLGSEGALSPGGVASLLRLPRGCGEQTMIYLAPTLAASRYLDKTEQWSTLPPETKDHAVDLIQKGYMRIQQFRKADGSYAAWLSRDSSTWLTAFVLKVLSLAQEQVGGSPEKLQETSNWLLSQQQADGSFQDPCPVLDRSMQGGLVGNDETVALTAFVTIALHHGLAVFQDEGAEPLKQRVEASISKANSFLGEKASAGLLGAHAAAITAYALTLTKAPVDLLGVAHNNLMAMAQETGDNLYWGSVTGSQSNAVSPTPAPRNPSDPMPQAPALWIETTAYALLHLLLHEGKAEMADQASAWLTRQGSFQGGFRSTQDTVIALDALSAYWIASHTTEERGLNVTLSSTGRNGFKSHALQLNNRQIRGLEEELQFSLGSKINVKVGGNSKGTLKVLRTYNVLDMKNTTCQDLQIEVTVKGHVEYTMEANEDYEDYEYDELPAKDDPDAPLQPVTPLQLFEGRRNRRRREAPKVVEEQESRVHYTVCIWRNGKVGLSGMAIADVTLLSGFHALRADLEKLTSLSDRYVSHFETEGPHVLLYFDSVPTSRECVGFEAVQEVPVGLVQPASATLYDYYNPERRCSVFYGAPSKSRLLATLCSAEVCQCAEGKCPRQRRALERGLQDEDGYRMKFACYYPRVEYGFQVKVLREDSRAAFRLFETKITQVLHFTKDVKAAANQMRNFLVRASCRLRLEPGKEYLIMGLDGATYDLEGHPQYLLDSNSWIEEMPSERLCRSTRQRAACAQLNDFLQEYGTQGCQV

SEQ ID NO: 60 - protein, 1744 aa, Homo sapiens
MRLLWGLIWASSFFTLSLQKPRLLLFSPSVVHLGVPLSVGVQLQDVPRGQVVKGSVFLRNPSRNNVPCSPKVDFTLSSERDFALLSLQVPLKDAKSCGLHQLLRGPEVQLVAHSPWLKDSLSRTTNIQGINLLFSSRRGHLFLQTDQPIYNPGQRVRYRVFALDQKMRPSTDTITVMVENSHGLRVRKKEVYMPSSIFQDDFVIPDISEPGTWKISARFSDGLESNSSTQFEVKKYVLPNFEVKITPGKPYILTVPGHLDEMQLDIQARYIYGKPVQGVAYVRFGLLDEDGKKTFFRGLESQTKLVNGQSHISLSKAEFQDALEKLNMGITDLQGLRLYVAAAIIESPGGEMEEAELTSWYFVSSPFSLDLSKTKRHLVPGAPFLLQALVREMSGSPASGIPVKVSATVSSPGSVPEVQDIQQNTDGSGQVSIPIIIPQTISELQLSVSAGSPHPAIARLTVAAPPSGGPGFLSIERPDSRPPRVGDTLNLNLRAVGSGATFSHYYYMILSRGQIVFMNREPKRTLTSVSVFVDHHLAPSFYFVAFYYHGDHPVANSLRVDVQAGACEGKLELSVDGAKQYRNGESVKLHLETDSLALVALGALDTALYAAGSKSHKPLNMGKVFEAMNSYDLGCGPGGGDSALQVFQAAGLAFSDGDQWTLSRKRLSCPKEKTTRKKRNVNFQKAINEKLGQYASPTAKRCCQDGVTRLPMMRSCEQRAARVQQPDCREPFLSCCQFAESLRKKSRDKGQAGLQRALEILQEEDLIDEDDIPVRSFFPENWLWRVETVDRFQILTLWLPDSLTTWEIHGLSLSKTKGLCVATPVQLRVFREFHLHLRLPMSVRRFEQLELRPVLYNYLDKNLTVSVHVSPVEGLCLAGGGGLAQQVLVPAGSARPVAFSVVPTAATAVSLKVVARGSFEFPVGDAVSKVLQIEKEGAIHREELVYELNPLDHRGRTLEIPGNSDPNMIPDGDFNSYVRVTASDPLDTLGSEGALSPGGVASLLRLPRGCGEQTMIYLAPTLAASRYLDKTEQWSTLPPETKDHAVDLIQKGYMRIQQFRKADGSYAAWLSRGSSTWLTAFVLKVLSLAQEQVGGSPEKLQETSNWLLSQQQADGSFQDLSPVIHRSMQGGLVGNDETVALTAFVTIALHHGLAVFQDEGAEPLKQRVEASISKASSFLGEKASAGLLGAHAAAITAYALTLTKAPADLRGVAHNNLMAMAQETGDNLYWGSVTGSQSNAVSPTPAPRNPSDPMPQAPALWIETTAYALLHLLLHEGKAEMADQAAAWLTRQGSFQGGFRSTQDTVIALDALSAYWIASHTTEERGLNVTLSSTGRNGFKSHALQLNNRQIRGLEEELQFSLGSKINVKVGGNSKGTLKVLRTYNVLDMKNTTCQDLQIEVTVKGHVEYTMEANEDYEDYEYDELPAKDDPDAPLQPVTPLQLFEGRRNRRRREAPKVVEEQESRVHYTVCIWRNGKVGLSGMAIADVTLLSGFHALRADLEKLTSLSDRYVSHFETEGPHVLLYFDSVPTSRECVGFEAVQEVPVGLVQPASATLYDYYNPERRCSVFYGAPSKSRLLATLCSAEVCQCAEGKCPRQRRALERGLQDEDGYRMKFACYYPRVEYGFQVKVLREDSRAAFRLFETKITQVLHFTKDVKAAANQMRNFLVRASCRLRLEPGKEYLIMGLDGATYDLEGHPQYLLDSNSWIEEMPSERLCRSTRQRAACAQLNDFLQEYGTQGCQV

SEQ ID NO: 61 - protein, 449 aa, Homo sapiens
MMKTLLLFVGLLLTWESGQVLGDQTVSDNELQEMSNQGSKYVNKEIQNAVNGVKQIKTLIEKTNEERKTLLSNLEEAKKKKEDALNETRESETKLKELPGVCNETMMALWEECKPCLKQTCMKFYARVCRSGSGLVGRQLEEFLNQSSPFYFWMNGDRIDSLLENDRQQTHMLDVMQDHFSRASSIIDELFQDRFFTREPQDTYHYLPFSLPHRRPHFFFPKSRIVRSLMPFSPYEPLNFHAMFQPFLEMIHEAQQAMDIHFHSPAFQHPPTEFIREGDDDRTVCREIRHNSTGCLRMKDQCDKCREILSVDCSTNNPSQAKLRRELDESLQVAERLTRKYNELLKSYQWKMLNTSSLLEQLNEQFNWVSRLANLTQGEDQYYLRVTTVASHTSDSDVPSGVTEVVVKLFDSDPITVTVPVEVSRKNPKFMETVAEKALQEYRKKHREE

SEQ ID NO: 62 - protein, 946 aa, Homo sapiens
MKRLTCFFICFFLSEVSGFEIPINGLSEFVDYEDLVELAPGKFQLVAENRRYQRSLPGESEEMMEEVDQVTLYSYKVQSTITSRMATTMIQSKVVNNSPQPQNVVFDVQIPKGAFISNFSMTVDGKTFRSSIKEKTVGRALYAQARAKGKTAGLVRSSALDMENFRTEVNVLPGAKVQFELHYQEVKWRKLGSYEHRIYLQPGRLAKHLEVDVWVIEPQGLRFLHVPDTFEGHFDGVPVISKGQQKAHVSFKPTVAQQRICPNCRETAVDGELVVLYDVKREEKAGELEVFNGYFVHFFAPDNLDPIPKNILFVIDVSGSMWGVKMKQTVEAMKTILDDLRAEDHFSVIDFNQNIRTWRNDLISATKTQVADAKRYIEKIQPSGGTNINEALLRAIFILNEANNLGLLDPNSVSLIILVSDGDPTVGELKLSKIQKNVKENIQDNISLFSLGMGFDVDYDFLKRLSNENHGIAQRIYGNQDTSSQLKKFYNQVSTPLLRNVQFNYPHTSVTDVTQNNFHNYFGGSEIVVAGKFDPAKLDQIESVITATSANTQLVLETLAQMDDLQDFLSKDKHADPDFTRKLWAYLTINQLLAERSLAPTAAAKRRITRSILQMSLDHHIVTPLTSLVIENEAGDERMLADAPPQDPSCCSGALYYGSKVVPDSTPSWANPSPTPVISMLAQGSQVLESTPPPHVMRVENDPHFIIYLPKSQKNICFNIDSEPGKILNLVSDPESGIVVNGQLVGAKKPNNGKLSTYFGKLGFYFQSEDIKIEISTETITLSHGSSTFSLSWSDTAQVTNQRVQISVKKEKVVTITLDKEMSFSVLLHRVWKKHPVNVDFLGIYIPPTNKFSPKAHGLIGQFMQEPKIHIFNERPGKDPEKPEASMEVKGQKLIITRGLQKDYRTDLVFGTDVTCWFVHNSGKGFIDGHYKDYFVPQLYSFLKRP

SEQ ID NO: 63 - protein, 911 aa, Homo sapiens
MDGAMGPRGLLLCMYLVSLLILQAMPALGSATGRSKSSEKRQAVDTAVDGVFIRSLKVNCKVTSRFAHYVVTSQVVNTANEAREVAFDLEIPKTAFISDFAVTADGNAFIGDIKDKVTAWKQYRKAAISGENAGLVRASGRTMEQFTIHLTVNPQSKVTFQLTYEEVLKRNHMQYEIVIKVKPKQLVHHFEIDVDIFEPQGISKLDAQASFLPKELAAQTIKKSFSGKKGHVLFRPTVSQQQSCPTCSTSLLNGHFKVTYDVSRDKICDLLVANNHFAHFFAPQNLTNMNKNVVFVIDISGSMRGQKVKQTKEALLKILGDMQPGDYFDLVLFGTRVQSWKGSLVQASEANLQAAQDFVRGFSLDEATNLNGGLLRGIEILNQVQESLPELSNHASILIMLTDGDPTEGVTDRSQILKNVRNAIRGRFPLYNLGFGHNVDFNFLEVMSMENNGRAQRIYEDHDATQQLQGFYSQVAKPLLVDVDLQYPQDAVLALTQNHHKQYYEGSEIVVAGRIADNKQSSFKADVQAHGEGQEFSITCLVDEEEMKKLLRERGHMLENHVERLWAYLTIQELLAKRMKVDREERANLSSQALQMSLDYGFVTPLTSMSIRGMADQDGLKPTIDKPSEDSPPLEMLGPRRTFVLSALQPSPTHSSSNTQRLPDRVTGVDTDPHFIIHVPQKEDTLCFNINEEPGVILSLVQDPNTGFSVNGQLIGNKARSPGQHDGTYFGRLGIANPATDFQLEVTPQNITLNPGFGGPVFSWRDQAVLRQDGVVVTINKKRNLVVSVDDGGTFEVVLHRVWKGSSVHQDFLGFYVLDSHRMSARTHGLLGQFFHPIGFEVSDIHPGSDPTKPDATMVVRNRRLTVTRGLQKDYSKDPWHGAEVSCWFIHNNGAGLIDGAYTDYIVPDIF

SEQ ID NO: 64 - protein, 298 aa, Homo sapiens
MVRMVPVLLSLLLLLGPAVPQENQDGRYSLTYIYTGLSKHVEDVPAFQALGSLNDLQFFRYNSKDRKSQPMGLWRQVEGMEDWKQDSQLQKAREDIFMETLKDIVEYYNDSNGSHVLQGRFGCEIENNRSSGAFWKYYYDGKDYIEFNKEIPAWVPFDPAAQITKQKWEAEPVYVQRAKAYLEEECPATLRKYLKYSKNILDRQDPPSVVVTSHQAPGEKKKLKCLAYDFYPGKIDVHWTRAGEVQEPELRGDVLHNGNGTYQSWVVVAVPPQDTAPYSCHVQHSSLAQPLVVPWEAS

SEQ ID NO: 65 - protein, 355 aa, Homo sapiens [sequence omitted]

SEQ ID NO: 66 - protein, 198 aa, Homo sapiens
MASGNARIGKPAPDFKATAVVDGAFKEVKLSDYKGKYVVLFFYPLDFTFVCPTEIIAFSNRAEDFRKLGCEVLGVSVDSQFTHLAWINTPRKEGGLGPLNIPLLADVTRRLSEDYGVLKTDEGIAYRGLFIIDGKGVLRQITVNDLPVGRSVDEALRLVQAFQYTDEHGEVCPAGWKPGSDTIKPNVDDSKEYFSKHN

SEQ ID NO: 67 - protein, 130 aa, Homo sapiens
MRLFTGIVFCSLVMGVTSESWRSFFKEALQGVGDMGRAYWDIMISNHQNSNRYLYARGNYDAAQRGPGGVWAAKLISRSRVYLQGLIDCYLFGNSSTVLEDSKSNEKAEEWGRSGKDPDRFRPDGLPKKY

SEQ ID NO: 68 - protein, 599 aa, Homo sapiens
MKLLKLTGFIFFLFFLTESLTLPTQPRDIENFNSTQKFIEDNIEYITIIAFAQYVQEATFEEMEKLVKDMVEYKDRCMADKTLPECSKLPNNVLQEKICAMEGLPQKHNFSHCCSKVDAQRRLCFFYNKKSDVGFLPPFPTLDPEEKCQAYESNRESLLNHFLYEVARRNPFVFAPTLLTVAVHFEEVAKSCCEEQNKVNCLQTRAIPVTQYLKAFSSYQKHVCGALLKFGTKVVHFIYIAILSQKFPKIEFKELISLVEDVSSNYDGCCEGDVVQCIRDTSKVMNHICSKQDSISSKIKECCEKKIPERGQCIINSNKDDRPKDLSLREGKFTDSENVCQERDADPDTFFAKFTFEYSRRHPDLSIPELLRIVQIYKDLLRNCCNTENPPGCYRYAEDKFNETTEKSLKMVQQECKHFQNLGKDGLKYHYLIRLTKIAPQLSTEELVSLGEKMVTAFTTCCTLSEEFACVDNLADLVFGELCGVNENRTINPAVDHCCKTNFAFRRPCFESLKADKTYVPPPFSQDLFTFHADMCQSQNEELQRKTDRFLVNLVKLKHELTDEELQSLFTNFANVVDKCCKAESPEVCFNEESPKIGN

SEQ ID NO: 69 - protein, 338 aa, Homo sapiens
MSLSAFTLFLALIGGTSGQYYDYDFPLSIYGQSSPNCAPECNCPESYPSAMYCDELKLKSVPMVPPGIKYLYLRNNQIDHIDEKAFENVTDLQWLILDHNLLENSKIKGRVFSKLKQLKKLHINHNNLTESVGPLPKSLEDLQLTHNKITKLGSFEGLVNLTFIHLQHNRLKEDAVSAAFKGLKSLEYLDLSFNQIARLPSGLPVSLLTLYLDNNKISNIPDEYFKRFNALQYLRLSHNELADSGIPGNSFNVSSLVELDLSYNKLKNIPTVNENLENYYLEVNQLEKFDIKSFCKILGPLSYSKIKHLRLDGNRISETSLPPDMYECLRVANEVTLN

SEQ ID NO: 70 - protein, 142 aa, Homo sapiens
MVLSPADKTNVKAAWGKVGAHAGEYGAEALERMFLSFPTTKTYFPHFDLSHGSAQVKGHGKKVADALTNAVAHVDDMPNALSALSDLHAHKLRVDPVNFKLLSHCLLVTLAAHLPAEFTPAVHASLDKFLASVSTVLTSKYR

SEQ ID NO: 71 - protein, 930 aa, Homo sapiens
MKPPRPVRTCSKVLVLLSLLAIHQTTTAEKNGIDIYSLTVDSRVSSRFAHTVVTSRVVNRANTVQEATFQMELPKKAFITNFSMIIDGMTYPGIIKEKAEAQAQYSAAVAKGKSAGLVKATGRNMEQFQVSVSVAPNAKITFELVYEELLKRRLGVYELLLKVRPQQLVKHLQMDIHIFEPQGISFLETESTFMTNQLVDALTTWQNKTKAHIRFKPTLSQQQKSPEQQETVLDGNLIIRYDVDRAISGGSIQIENGYFVHYFAPEGLTTMPKNVVFVIDKSGSMSGRKIQQTREALIKILDDLSPRDQFNLIVFSTEATQWRPSLVPASAENVNKARSFAAGIQALGGTNINDAMLMAVQLLDSSNQEERLPEGSVSLIILLTDGDPTVGETNPRSIQNNVREAVSGRYSLFCLGFGFDVSYAFLEKLALDNGGLARRIHEDSDSALQLQDFYQEVANPLLTAVTFEYPSNAVEEVTQNNFRLLFKGSEMVVAGKLQDRGPDVLTATVSGKLPTQNITFQTESSVAEQEAEFQSPKYIFHNFMERLWAYLTIQQLLEQTVSASDADQQALRNQALNLSLAYSFVTPLTSMVVTKPDDQEQSQVAEKPMEGESRNRNVHSGSTFFKYYLQGAKIPKPEASFSPRRGWNRQAGAAGSRMNFRPGVLSSRQLGLPGPPDVPDHAAYHPFRRLAILPASAPPATSNPDPAVSRVMNMKIEETTMTTQTPAPIQAPSAILPLPGQSVERLCVDPRHRQGPVNLLSDPEQGVEVTGQYEREKAGFSWIEVTFKNPLVWVHASPEHVVVTRNRRSSAYKWKETLFSVMPGLKMTMDKTGLLLLSDPDKVTIGLLFWDGRGEGLRLLLRDTDRFSSHVGGTLGQFYQEVLWGSPAASDDGRRTLRVQGNDHSATRERRLDYQEGPPGVEISCWSVEL

SEQ ID NO: 72 - protein, 354 aa, Homo sapiens
MGKLVALVLLGVGLSLVGEMFLAFRERVNASREVEPVEPENCHLIEELESGSEDIDILPSGLAFISSGLKYPGMPNFAPDEPGKIFLMDLNEQNPRAQALEISGGFDKELFNPHGISIFIDKDNTVYLYVVNHPHMKSTVEIFKFEEQQRSLVYLKTIKHELLKSVNDIVVLGPEQFYATRDHYFTNSLLSFFEMILDLRWTYVLFYSPREVKVVAKGFCSANGITVSADQKYVYVADVAAKNIHIMEKHDNWDLTQLKVIQLGTLVDNLTVDPATGDILAGCHPNPMKLLNYNPEDPPGSEVLRIQNVLSEKPRVSTVYANNGSVLQGTSVASVYHGKILIGTVFHKTLYCEL

SEQ ID NO: 73 - protein, 9 aa, Escherichia coli
WVGYGQDSR

SEQ ID NO: 74 - protein, 9 aa, Escherichia coli
IDPNAWVER

SEQ ID NO: 75 - protein, 9 aa, Escherichia coli
GDFQFNISR

SEQ ID NO: 76 - protein, 10 aa, Homo sapiens
LVNEVTEFAK

SEQ ID NO: 77 - protein, 8 aa, Homo sapiens
DDNPNLPR

SEQ ID NO: 78 - protein, 9 aa, Homo sapiens
TGLQEVEVK

SEQ ID NO: 79 - protein, 10 aa, Homo sapiens
SVLGQLGITK

SEQ ID NO: 80 - protein, 8 aa, Homo sapiens
TEDTIFLR

SEQ ID NO: 81 - protein, 11 aa, Homo sapiens
NFPSPVDAAFR

SEQ ID NO: 82 - protein, 11 aa, Homo sapiens
GWVTDGFSSLK

SEQ ID NO: 83 - protein, 9 aa, Homo sapiens
LNILNNNYK

SEQ ID NO: 84 - protein, 11 aa, Homo sapiens
DIFTGLIGPMK

SEQ ID NO: 85 - protein, 13 aa, Homo sapiens
GAYPLSIEPIGVR

SEQ ID NO: 86 - protein, 12 aa, Homo sapiens
QSEDSTFYLGER

SEQ ID NO: 87 - protein, 14 aa, Escherichia coli
APLDNDIGVSEATR

SEQ ID NO: 88 - protein, 11 aa, Escherichia coli
LWSAEIPNLYR

SEQ ID NO: 89 - protein, 12 aa, Escherichia coli
VDEDQPFPAVPK

SEQ ID NO: 90 - protein, 27 aa, Escherichia coli
VTVSLWQGETQVASGTAPFGGEIIDER

SEQ ID NO: 91 - protein, 8 aa, Homo sapiens
WLPAMSER

SEQ ID NO: 92 - protein, 10 aa, Homo sapiens
ELLESYIDGR

SEQ ID NO: 93 - protein, 12 aa, Homo sapiens
ETAASLLQAGYK

SEQ ID NO: 94 - protein, 8 aa, Homo sapiens
VTGWGNLK

SEQ ID NO: 95 - protein, 7 aa, Homo sapiens
YTTEIIK

SEQ ID NO: 96 - protein, 12 aa, Homo sapiens
DIAPTLTLYVGK

SEQ ID NO: 97 - protein, 12 aa, Homo sapiens
TEGDGVYTLNDK

SEQ ID NO: 98 - protein, 9 aa, Homo sapiens
VGYVSGWGR

SEQ ID NO: 99 - protein, 19 aa, Homo sapiens
NTEQEEGGEAVHEVEVVIK

SEQ ID NO: 100 - protein, 7 aa, Homo sapiens
LFLEPTR

SEQ ID NO: 101 - protein, 10 aa, Homo sapiens
LSSPAVITDK

SEQ ID NO: 102 - protein, 22 aa, Homo sapiens
VILGAHQEVNLEPHVQEIEVSR

SEQ ID NO: 103 - protein, 8 aa, Homo sapiens
EQPPSLTR

SEQ ID NO: 104 - protein, 9 aa, Homo sapiens
ALFVSEEEK

SEQ ID NO: 105 - protein, 10 aa, Homo sapiens
EELLPAQDIK

SEQ ID NO: 106 - protein, 12 aa, Homo sapiens
EVPLNTIIFMGR

SEQ ID NO: 107 - protein, 8 aa, Homo sapiens
IEDGFSLK

SEQ ID NO: 108 - protein, 8 aa, Homo sapiens
AVLTIDEK

SEQ ID NO: 109 - protein, 15 aa, Homo sapiens
LQHLENELTHDIITK

SEQ ID NO: 110 - protein, 8 aa, Homo sapiens
QINDYVEK

SEQ ID NO: 111 - protein, 18 aa, Homo sapiens
VFSNGADLSGVTEEAPLK

SEQ ID NO: 112 - protein, 10 aa, Homo sapiens
ADLSGITGAR

SEQ ID NO: 113 - protein, 9 aa, Homo sapiens
EIGELYLPK

SEQ ID NO: 114 - protein, 8 aa, Homo sapiens
EQLSLLDR

SEQ ID NO: 115 - protein, 14 aa, Homo sapiens
MEEVEAMLLPETLK

SEQ ID NO: 116 - protein, 10 aa, Homo sapiens
NLAVSQVVHK

SEQ ID NO: 117 - protein, 9 aa, Homo sapiens
FMQAVTGWK

SEQ ID NO: 118 - protein, 10 aa, Homo sapiens
LQAILGVPWK

SEQ ID NO: 119 - protein, 13 aa, Homo sapiens
SLDFTELDVAAEK

SEQ ID NO: 120 - protein, 11 aa, Homo sapiens
AIGYLNTGYQR

SEQ ID NO: 121 - protein, 12 aa, Homo sapiens
NEDSLVFVQTDK

SEQ ID NO: 122 - protein, 8 aa, Homo sapiens
SDIAPVAR

SEQ ID NO: 123 - protein, 9 aa, Homo sapiens
SLNEEAVKK

SEQ ID NO: 124 - protein, 14 aa, Homo sapiens
TEHPFTVEEFVLPK

SEQ ID NO: 125 - protein, 8 aa, Homo sapiens
ISLPESLK

SEQ ID NO: 126 - protein, 10 aa, Homo sapiens
LQGTLPVEAR

SEQ ID NO: 127 - protein, 11 aa, Homo sapiens
TLLPVSKPEIR

SEQ ID NO: 128 - protein, 7 aa, Homo sapiens
DTLMISR

SEQ ID NO: 129 - protein, 16 aa, Homo sapiens
VVSVLTVLHQDWLNGK

SEQ ID NO: 130 - protein, 7 aa, Homo sapiens
GFPSVLR

SEQ ID NO: 131 - protein, 16 aa, Homo sapiens
QVGSGVTTDQVQAEAK

SEQ ID NO: 132 - protein, 15 aa, Homo sapiens
YVTSAPMPEPQAPGR

SEQ ID NO: 133 - protein, 9 aa, Homo sapiens
TPLTATLSK

SEQ ID NO: 134 - protein, 7 aa, Homo sapiens
VAAEDWK

SEQ ID NO: 135 - protein, 10 aa, Homo sapiens
WLQGSQELPR

SEQ ID NO: 136 - protein, 11 aa, Homo sapiens
ATEHLSTLSEK

SEQ ID NO: 137 - protein, 11 aa, Homo sapiens
DLATVYVDVLK

SEQ ID NO: 138 - protein, 11 aa, Homo sapiens
THLAPYSDELR

SEQ ID NO: 139 - protein, 10 aa, Homo sapiens
VQPYLDDFQK

SEQ ID NO: 140 - protein, 12 aa, Homo sapiens
VSFLSALEEYTK

SEQ ID NO: 141 - protein, 7 aa, Homo sapiens
AQAWGER

SEQ ID NO: 142 - protein, 9 aa, Homo sapiens
LGPLVEQGR

SEQ ID NO: 143 - protein, 7 aa, Homo sapiens
WELALGR

SEQ ID NO: 144 - protein, 9 aa, Homo sapiens
SPELQAEAK

SEQ ID NO: 145 - protein, 9 aa, Homo sapiens
EFGNTLEDK

SEQ ID NO: 146 - protein, 9 aa, Homo sapiens
TAAQNLYEK

SEQ ID NO: 147 - protein, 9 aa, Homo sapiens
TYLPAVDEK

SEQ ID NO: 148 - protein, 8 aa, Homo sapiens
NSLFEYQK

SEQ ID NO: 149 - protein, 6 aa, Homo sapiens
AFVFPK

SEQ ID NO: 150 - protein, 10 aa, Homo sapiens
GYSIFSYATK

SEQ ID NO: 151 - protein, 7 aa, Homo sapiens
IAFSATR

SEQ ID NO: 152 - protein, 12 aa, Homo sapiens
TNQVNSGGVLLR

SEQ ID NO: 153 - protein, 9 aa, Homo sapiens
VVEESELAR

SEQ ID NO: 154 - protein, 11 aa, Homo sapiens
ALGHLDLSGNR

SEQ ID NO: 155 - protein, 10 aa, Homo sapiens
DLLLPQPDLR

SEQ ID NO: 156 - protein, 8 aa, Homo sapiens
ETLLQDFR

SEQ ID NO: 157 - protein, 15 aa, Homo sapiens
NWGLSVYADKPETTK

SEQ ID NO: 158 - protein, 9 aa, Homo sapiens
SDVVYTDWK

SEQ ID NO: 159 - protein, 10 aa, Homo sapiens
HTLNQIDEVK

SEQ ID NO: 160 - protein, 8 aa, Homo sapiens
AEFAEVSK

SEQ ID NO: 161 - protein, 12 aa, Homo sapiens
AVMDDFAAFVEK

SEQ ID NO: 162 - protein, 8 aa, Homo sapiens
DLGEENFK

SEQ ID NO: 163 - protein, 13 aa, Homo sapiens
DVFLGMFLYEYAR

SEQ ID NO: 164 - protein, 8 aa, Homo sapiens
FQNALLVR

SEQ ID NO: 165 - protein, 11 aa, Homo sapiens
HPDYSVVLLLR

SEQ ID NO: 166 - protein, 8 aa, Homo sapiens
TYETTLEK

SEQ ID NO: 167 - protein, 7 aa, Homo sapiens
VLEPTLK

SEQ ID NO: 168 - protein, 7 aa, Homo sapiens
YTFELSR

SEQ ID NO: 169 - protein, 10 aa, Homo sapiens
DGAGDVAFVK

SEQ ID NO: 170 - protein, 8 aa, Homo sapiens
DSAHGFLK

SEQ ID NO: 171 - protein, 11 aa, Homo sapiens
EGYYGYTGAFR

SEQ ID NO: 172 - protein, 11 aa, Homo sapiens
SASDLTWDNLK

SEQ ID NO: 173 - protein, 16 aa, Homo sapiens
SGAQATWTELPWPHEK

SEQ ID NO: 174 - protein, 10 aa, Homo sapiens
  MOD_RES (7)..(7): Met, Ser or His
VDGALCXMEK

SEQ ID NO: 175 - protein, 11 aa, Homo sapiens
YSPGGTPTAIK

SEQ ID NO: 176 - protein, 11 aa, Homo sapiens
EDVYVVGTVLR

SEQ ID NO: 177 - protein, 12 aa, Homo sapiens
FEDGVLDPDYPR

SEQ ID NO: 178 - protein, 12 aa, Homo sapiens
GFEPTLEALFGK

SEQ ID NO: 179 - protein, 19 aa, Homo sapiens
ILGEELGFASLHDLQLLGK

SEQ ID NO: 180 - protein, 9 aa, Homo sapiens
IPSVQINFK

SEQ ID NO: 181 - protein, 9 aa, Homo sapiens
LDVTTSIGR

SEQ ID NO: 182 - protein, 11 aa, Homo sapiens
SEYQADYESLR

SEQ ID NO: 183 - protein, 13 aa, Homo sapiens
SVSLPSLDPASAK

SEQ ID NO: 184 - protein, 12 aa, Homo sapiens
HQFLLTGDTQGR

SEQ ID NO: 185 - protein, 8 aa, Homo sapiens
LLELTGPK

SEQ ID NO: 186 - protein, 16 aa, Homo sapiens
NGVAQEPVHLDSPAIK

SEQ ID NO: 187 - protein, 13 aa, Homo sapiens
ILAGPAGDSNVVK

SEQ ID NO: 188 - protein, 8 aa, Homo sapiens
VVLSQGSK

SEQ ID NO: 189 - protein, 11 aa, Homo sapiens
FSIEGSYQLEK

SEQ ID NO: 190 - protein, 17 aa, Homo sapiens
GVTSVSQIFHSPDLAIR

SEQ ID NO: 191 - protein, 8 aa, Homo sapiens
AVLHIGEK

SEQ ID NO: 192 - protein, 11 aa, Homo sapiens
NGNMAGISDQR

SEQ ID NO: 193 - protein, 9 aa, Homo sapiens
QFPILLDFK

SEQ ID NO: 194 - protein, 9 aa, Homo sapiens
SVNDLYIQK

SEQ ID NO: 195 - protein, 9 aa, Homo sapiens
TLEAQLTPR

SEQ ID NO: 196 - protein, 13 aa, Homo sapiens
AGALNSNDAFVLK

SEQ ID NO: 197 - protein, 8 aa, Homo sapiens
TASDFITK

SEQ ID NO: 198 - protein, 8 aa, Homo sapiens
TGAQELLR

SEQ ID NO: 199 - protein, 9 aa, Homo sapiens
YIETDPANR

SEQ ID NO: 200 - protein, 9 aa, Homo sapiens
ISASAEELR

SEQ ID NO: 201 - protein, 13 aa, Homo sapiens
LGEVNTYAGDLQK

SEQ ID NO: 202 - protein, 11 aa, Homo sapiens
LLPHANEVSQK

SEQ ID NO: 203 - protein, 12 aa, Homo sapiens
SLAPYAQDTQEK

SEQ ID NO: 204 - protein, 10 aa, Homo sapiens
AMAVEDIISR

SEQ ID NO: 205 - protein, 9 aa, Homo sapiens
MESLGITSR

SEQ ID NO: 206 - protein, 9 aa, Homo sapiens
IVLLDVPVR

SEQ ID NO: 207 - protein, 14 aa, Homo sapiens
LFLEPTQADIALLK

SEQ ID NO: 208 - protein, 9 aa, Homo sapiens
IDVHLVPDR

SEQ ID NO: 209 - protein, 13 aa, Homo sapiens
SPDVINGSPISQK

SEQ ID NO: 210 - protein, 12 aa, Homo sapiens
SSNLIILEEHLK

SEQ ID NO: 211 - protein, 7 aa, Homo sapiens
DFLQSLK

SEQ ID NO: 212 - protein, 8 aa, Homo sapiens
FDPSLTQR

SEQ ID NO: 213 - protein, 13 aa, Homo sapiens
LGNQEPGGQTALK

SEQ ID NO: 214 - protein, 11 aa, Homo sapiens
TNFDNDIALVR

SEQ ID NO: 215 - protein, 9 aa, Homo sapiens
DHAVDLIQK

SEQ ID NO: 216 - protein, 13 aa, Homo sapiens
GLEEELQFSLGSK

SEQ ID NO: 217 - protein, 10 aa, Homo sapiens
VDGTLNLNLR

SEQ ID NO: 218 - protein, 12 aa, Homo sapiens
AGGSWDLAVQER

SEQ ID NO: 219 - protein, 10 aa, Homo sapiens
EIQNAVNGVK

SEQ ID NO: 220 - protein, 11 aa, Homo sapiens
ELDESLQVAER

SEQ ID NO: 221 - protein, 8 aa, Homo sapiens
FMETVAEK

SEQ ID NO: 222 - protein, 9 aa, Homo sapiens
IDSLLENDR

SEQ ID NO: 223 - protein, 10 aa, Homo sapiens
TLLSNLEEAK

SEQ ID NO: 224 - protein, 7 aa, Homo sapiens
IYLQPGR

SEQ ID NO: 225 - protein, 9 aa, Homo sapiens
MATTMIQSK

SEQ ID NO: 226 - protein, 9 aa, Homo sapiens
SLAPTAAAK

SEQ ID NO: 227 - protein, 12 aa, Homo sapiens
AAISGENAGLVR

SEQ ID NO: 228 - protein, 19 aa, Homo sapiens
GSLVQASEANLQAAQDFVR

SEQ ID NO: 229 - protein, 7 aa, Homo sapiens
VTYDVSR

SEQ ID NO: 230 - protein, 12 aa, Homo sapiens
YSLTYIYTGLSK

SEQ ID NO: 231 - protein, 9 aa, Homo sapiens
SFNPNSPGK

SEQ ID NO: 232 - protein, 9 aa, Homo sapiens
LSEDYGVLK

SEQ ID NO: 233 - protein, 8 aa, Homo sapiens
FRPDGLPK

SEQ ID NO: 234 - protein, 13 aa, Homo sapiens
ESLLNHFLYEVAR

SEQ ID NO: 235 - protein, 7 aa, Homo sapiens
FLVNLVK

SEQ ID NO: 236 - protein, 16 aa, Homo sapiens
IAPQLSTEELVSLGEK

SEQ ID NO: 237 - protein, 11 aa, Homo sapiens
SLEDLQLTHNK

SEQ ID NO: 238 - protein, 9 aa, Homo sapiens
MFLSFPTTK

SEQ ID NO: 239 - protein, 16 aa, Homo sapiens
TYFPHFDLSHGSAQVK

SEQ ID NO: 240 - protein, 15 aa, Homo sapiens
VGAHAGEYGAEALER

SEQ ID NO: 241 - protein, 10 aa, Homo sapiens
LALDNGGLAR

SEQ ID NO: 242 - protein, 9 aa, Homo sapiens
YIFHNFMER

SEQ ID NO: 243 - protein, 10 aa, Homo sapiens
YVYVADVAAK

SEQ ID NO: 244 - protein, 5 aa, Escherichia coli
WVGYG

SEQ ID NO: 245 - protein, 5 aa, Homo sapiens
TGLQE

SEQ ID NO: 246 - protein, 5 aa, Homo sapiens
SVLGQ

SEQ ID NO: 247 - protein, 5 aa, Homo sapiens
TEDTI

SEQ ID NO: 248 - protein, 5 aa, Homo sapiens
LVNEV

SEQ ID NO: 249 - protein, 5 aa, Homo sapiens
NFPSP

SEQ ID NO: 250 - protein, 5 aa, Homo sapiens
GWVTD

SEQ ID NO: 251 - protein, 4 aa, Escherichia coli
WLPA

SEQ ID NO: 252 - protein, 10 aa, Homo sapiens
SDDKVTLEER

SEQ ID NO: 253 - protein, 13 aa, Homo sapiens
HFEDGVLDPDYPR

SEQ ID NO: 254 - protein, 5 aa, Homo sapiens
APLDN

SEQ ID NO: 255 - protein, 5 aa, Homo sapiens
LWSAE

SEQ ID NO: 256 - protein, 5 aa, Homo sapiens
VDEDQ

SEQ ID NO: 257 - protein, 5 aa, Homo sapiens
WLPAM

SEQ ID NO: 258 - protein, 5 aa, Homo sapiens
WVGYG

SEQ ID NO: 259 - protein, 5 aa, Homo sapiens
IDPNA

SEQ ID NO: 260 - protein, 7 aa, Homo sapiens
FIIPSPK

SEQ ID NO: 261 - protein, 7 aa, Homo sapiens
SVQLTEK

SEQ ID NO: 262 - protein, 7 aa, Homo sapiens
TFISPIK

SEQ ID NO: 263 - protein, 10 aa, Homo sapiens
IHWESASLLR

SEQ ID NO: 264 - protein, 11 aa, Homo sapiens
VTIKPAPETEK

SEQ ID NO: 265 - protein, 7 aa, Homo sapiens
DYAEVGR

SEQ ID NO: 266 - protein, 7 aa, Homo sapiens
AQIPILR

SEQ ID NO: 267 - protein, 7 aa, Homo sapiens
GPLQLER

SEQ ID NO: 268 - protein, 7 aa, Homo sapiens
TINVPLR

SEQ ID NO: 269 - protein, 7 aa, Homo sapiens
FSVVYAK

SEQ ID NO: 270 - protein, 7 aa, Homo sapiens
TPALHFK

SEQ ID NO: 271 - protein, 7 aa, Homo sapiens
EFSHLGK

SEQ ID NO: 272 - protein, 15 aa, Homo sapiens
ESSSHHPGIAEFPSR

SEQ ID NO: 273 - protein, 7 aa, Homo sapiens
LSLPDFK

SEQ ID NO: 274 - protein, 7 aa, Homo sapiens
IAIDLFK

SEQ ID NO: 275 - protein, 7 aa, Homo sapiens
DLLYIGK

SEQ ID NO: 276 - protein, 7 aa, Homo sapiens
STVEIFK

SEQ ID NO: 277 - protein, 8 aa, Homo sapiens
ASHLGLAR

SEQ ID NO: 278 - protein, 11 aa, Homo sapiens
LSNENHGIAQR

SEQ ID NO: 279 - protein, 11 aa, Homo sapiens
SEILAHWSPAK

SEQ ID NO: 280 - protein, 7 aa, Homo sapiens
NPDPWAK

SEQ ID NO: 281 - protein, 8 aa, Homo sapiens
LGNNPVSK

SEQ ID NO: 282 - protein, 7 aa, Homo sapiens
SIQNNVR

SEQ ID NO: 283 - protein, 7 aa, Homo sapiens
YYLQGAK

SEQ ID NO: 284 - protein, 8 aa, Homo sapiens
VVLVAVDK

SEQ ID NO: 285 - protein, 8 aa, Homo sapiens
IGVELTGR

SEQ ID NO: 286 - protein, 7 aa, Homo sapiens
QHLPLIK

SEQ ID NO: 287 - protein, 11 aa, Homo sapiens
HSTIFENLANK

SEQ ID NO: 288 - protein, 7 aa, Homo sapiens
EAQEVFK

SEQ ID NO: 289 - protein, 8 aa, Homo sapiens
NPNPSAPR

SEQ ID NO: 290 - protein, 8 aa, Homo sapiens
SASLHLPK

SEQ ID NO: 291 - protein, 7 aa, Homo sapiens
SHDELPR

SEQ ID NO: 292 - protein, 11 aa, Homo sapiens
HPDLSIPELLR

SEQ ID NO: 293 - protein, 8 aa, Homo sapiens
NDLISATK

SEQ ID NO: 294 - protein, 7 aa, Homo sapiens
ITLPDFR

SEQ ID NO: 295 - protein, 15 aa, Homo sapiens
LELHVDGPPPRPQLR

SEQ ID NO: 296 - protein, 7 aa, Homo sapiens
ETLEDTR

SEQ ID NO: 297 - protein, 12 aa, Homo sapiens
VSEGNHDIALIK

SEQ ID NO: 298 - protein, 7 aa, Homo sapiens
LINDYVK

SEQ ID NO: 299 - protein, 7 aa, Homo sapiens
NFEITIK

SEQ ID NO: 300 - protein, 11 aa, Homo sapiens
HSIFTPETNPR

SEQ ID NO: 301 - protein, 8 aa, Homo sapiens
GIYGTISR

SEQ ID NO: 302 - protein, 8 aa, Homo sapiens
GDSTFESK

SEQ ID NO: 303 - protein, 10 aa, Homo sapiens
IISDYHQQFR

SEQ ID NO: 304 - protein, 8 aa, Homo sapiens
QGALELIK

SEQ ID NO: 305 - protein, 8 aa, Homo sapiens
QLANGVDR

SEQ ID NO: 306 - protein, 11 aa, Homo sapiens
DDLYVSDAFHK

SEQ ID NO: 307 - protein, 8 aa, Homo sapiens
AELQEGAR

SEQ ID NO: 308 - protein, 8 aa, Homo sapiens
ELAAQTIK

SEQ ID NO: 309 - protein, 15 aa, Homo sapiens
YVGGQEHFAHLLILR

SEQ ID NO: 310 - protein, 7 aa, Homo sapiens
KPVDEYK

SEQ ID NO: 311 - protein, 11 aa, Homo sapiens
YVYIAELLAHK

SEQ ID NO: 312 - protein, 9 aa, Homo sapiens
VVGGLVALR

SEQ ID NO: 313 - protein, 8 aa, Homo sapiens
SLNEEAVK

SEQ ID NO: 314 - protein, 9 aa, Homo sapiens
TGIVSGFGR

SEQ ID NO: 315 - protein, 8 aa, Homo sapiens
IPLDLVPK

SEQ ID NO: 316 - protein, 7 aa, Homo sapiens
DYWSTVK

SEQ ID NO: 317 - protein, 7 aa, Homo sapiens
YEFLNGR

SEQ ID NO: 318 - protein, 8 aa, Homo sapiens
GPLDQLEK

SEQ ID NO: 319 - protein, 8 aa, Homo sapiens
ISVIRPSK

SEQ ID NO: 320 - protein, 8 aa, Homo sapiens
GEFYIGSK

SEQ ID NO: 321 - protein, 9 aa, Homo sapiens
GQTLLAVAK

SEQ ID NO: 322 - protein, 8 aa, Homo sapiens
GYGNSDYK

SEQ ID NO: 323 - protein, 17 aa, Homo sapiens
LGPHAGDVEGHLSFLEK

SEQ ID NO: 324 - protein, 7 aa, Homo sapiens
SLWDFLK

SEQ ID NO: 325 - protein, 8 aa, Homo sapiens
LLEVPEGR

SEQ ID NO: 326 - protein, 8 aa, Homo sapiens
VEDIPLAR

SEQ ID NO: 327 - protein, 9 aa, Homo sapiens
DSVTGTLPK

SEQ ID NO: 328 - protein, 7 aa, Homo sapiens
FLENEDR

SEQ ID NO: 329 - protein, 8 aa, Homo sapiens
ALPTTYEK

SEQ ID NO: 330 - protein, 8 aa, Homo sapiens
QSFDLSVK

SEQ ID NO: 331 - protein, 9 aa, Homo sapiens
TVIGPDGHK

SEQ ID NO: 332 - protein, 7 aa, Homo sapiens
DFSLWEK

SEQ ID NO: 333 - protein, 7 aa, Homo sapiens
DYEDQQK

SEQ ID NO: 334 - protein, 8 aa, Homo sapiens
NGFYPATR

SEQ ID NO: 335 - protein, 9 aa, Homo sapiens
TGTHGLLVK

SEQ ID NO: 336 - protein, 7 aa, Homo sapiens
YLYEIAR

SEQ ID NO: 337 - protein, 7 aa, Homo sapiens
DYIEFNK

SEQ ID NO: 338 - protein, 8 aa, Homo sapiens
QLEQVIAK

SEQ ID NO: 339 - protein, 9 aa, Homo sapiens
IEDGTLASK

SEQ ID NO: 340 - protein, 8 aa, Homo sapiens
NVVFVIDK

SEQ ID NO: 341 - protein, 13 aa, Homo sapiens
DYVSQFEGSALGK

SEQ ID NO: 342 - protein, 11 aa, Homo sapiens
QLNEINYEDHK

SEQ ID NO: 343 - protein, 8 aa, Homo sapiens
FTVETPDK

SEQ ID NO: 344 - protein, 8 aa, Homo sapiens
FTPTETNK

SEQ ID NO: 345 - protein, 11 aa, Homo sapiens
YEITTIHNLFR

SEQ ID NO: 346 - protein, 8 aa, Homo sapiens
ELSSFIDK

SEQ ID NO: 347 - protein, 8 aa, Homo sapiens
EQLTPLIK

SEQ ID NO: 348 - protein, 8 aa, Homo sapiens
LTLDIQNK

SEQ ID NO: 349 - protein, 8 aa, Homo sapiens
VAQELEEK

SEQ ID NO: 350 - protein, 9 aa, Homo sapiens
GYILVGQAK

SEQ ID NO: 351 - protein, 9 aa, Homo sapiens
FVTQAEGAK

SEQ ID NO: 352 - protein, 8 aa, Homo sapiens
DSEITFIK

SEQ ID NO: 353 - protein, 8 aa, Homo sapiens
ELPEHTVK

SEQ ID NO: 354 - protein, 8 aa, Homo sapiens
EAVEHLQK

SEQ ID NO: 355 - protein, 9 aa, Homo sapiens
SISAALEHK

SEQ ID NO: 356 - protein, 7 aa, Homo sapiens
NDFTWFK

SEQ ID NO: 357 - protein, 8 aa, Homo sapiens
HADPDFTR

SEQ ID NO: 358 - protein, 9 aa, Homo sapiens
SPSQADINK

SEQ ID NO: 359 - protein, 9 aa, Homo sapiens
GLEVTITAR

SEQ ID NO: 360 - protein, 9 aa, Homo sapiens
APNHAVVTR

SEQ ID NO: 361 - protein, 12 aa, Homo sapiens
IDTQDIEASHYR

SEQ ID NO: 362 - protein, 9 aa, Homo sapiens
STGSWSTLK

SEQ ID NO: 363 - protein, 9 aa, Homo sapiens
GDFSSANNR

SEQ ID NO: 364 - protein, 8 aa, Homo sapiens
YLFLNGNK

SEQ ID NO: 365 - protein, 7 aa, Homo sapiens
YYELEEK

SEQ ID NO: 366 - protein, 8 aa, Homo sapiens
QIDDIDVR

SEQ ID NO: 367 - protein, 7 aa, Homo sapiens
LWWLDLK

SEQ ID NO: 368 - protein, 10 aa, Homo sapiens
GISSTTVTGR

SEQ ID NO: 369 - protein, 13 aa, Homo sapiens
AHVSFKPTVAQQR

SEQ ID NO: 370 - protein, 9 aa, Homo sapiens
LAPLAEDVR

SEQ ID NO: 371 - protein, 16 aa, Homo sapiens
TIHDLHLFIENIDFNK

SEQ ID NO: 372 - protein, 10 aa, Homo sapiens
IIGGSDADIK

SEQ ID NO: 373 - protein, 10 aa, Homo sapiens
VAAGAFQGLR

SEQ ID NO: 374 - protein, 14 aa, Homo sapiens
AHLDIAGSLEGHLR

SEQ ID NO: 375 - protein, 18 aa, Homo sapiens
ENADSLQASLRPHADELK

SEQ ID NO: 376 - protein, 11 aa, Homo sapiens
GASQAGAPQGR

SEQ ID NO: 377 - protein, 8 aa, Homo sapiens
YLGEEYVK

SEQ ID NO: 378 - protein, 8 aa, Homo sapiens
LYYGDDEK

SEQ ID NO: 379 - protein, 9 aa, Homo sapiens
ETWTANVGK

SEQ ID NO: 380 - protein, 8 aa, Homo sapiens
FQVDNNNR

SEQ ID NO: 381 - protein, 10 aa, Homo sapiens
GTLSTTITGR

SEQ ID NO: 382 - protein, 10 aa, Homo sapiens
GSFSTTVTGR

SEQ ID NO: 383 - protein, 9 aa, Homo sapiens
AKPALEDLR

SEQ ID NO: 384 - protein, 9 aa, Homo sapiens
DISEVVTPR

SEQ ID NO: 385 - protein, 12 aa, Homo sapiens
TEHYEEQIEAFK

SEQ ID NO: 386 - protein, 8 aa, Homo sapiens
DNEQHVFK

SEQ ID NO: 387 - protein, 8 aa, Homo sapiens
QYTDSTFR

SEQ ID NO: 388 - protein, 8 aa, Homo sapiens
VWVYPPEK

SEQ ID NO: 389 - protein, 9 aa, Homo sapiens
FAHTVVTSR

SEQ ID NO: 390 - protein, 9 aa, Homo sapiens
GFQVVVTLR

SEQ ID NO: 391 - protein, 9 aa, Homo sapiens
NNALDFVTK

SEQ ID NO: 392 - protein, 8 aa, Homo sapiens
QVFLYPEK

SEQ ID NO: 393 - protein, 19 aa, Homo sapiens
VDLSFSPSQSLPASHAHLR

SEQ ID NO: 394 - protein, 10 aa, Homo sapiens
TEVNVLPGAK

SEQ ID NO: 395 - protein, 15 aa, Homo sapiens
LLSGGNTLHLVSTTK

SEQ ID NO: 396 - protein, 9 aa, Homo sapiens
LSNVLQQVK

SEQ ID NO: 397 - protein, 8 aa, Homo sapiens
QIQVSWLR

SEQ ID NO: 398 - protein, 13 aa, Homo sapiens
LVHVEEPHTETVR

SEQ ID NO: 399 - protein, 9 aa, Homo sapiens
DNVFDGLVR

SEQ ID NO: 400 - protein, 9 aa, Homo sapiens
GEIQNILQK

SEQ ID NO: 401 - protein, 9 aa, Homo sapiens
FEVQVTVPK

SEQ ID NO: 402 - protein, 13 aa, Homo sapiens
GFQQLLQELNQPR

SEQ ID NO: 403 - protein, 9 aa, Homo sapiens
FPEVDVLTK

SEQ ID NO: 404 - protein, 9 aa, Homo sapiens
LGVYELLLK

SEQ ID NO: 405 - protein, 10 aa, Homo sapiens
HTSLGPLEAK

SEQ ID NO: 406 - protein, 9 aa, Homo sapiens
LDNIYSSDK

SEQ ID NO: 407 - protein, 9 aa, Homo sapiens
LPNNVLQEK

SEQ ID NO: 408 - protein, 15 aa, Homo sapiens
HPDEAAFFDTASTGK

SEQ ID NO: 409 - protein, 9 aa, Homo sapiens
NIILPVYDK

SEQ ID NO: 410 - protein, 8 aa, Homo sapiens
DFTFDLYR

SEQ ID NO: 411 - protein, 9 aa, Homo sapiens
ESDEETQIK

SEQ ID NO: 412 - protein, 9 aa, Homo sapiens
NYNLVESLK

SEQ ID NO: 413 - protein, 11 aa, Homo sapiens
GDSGGPLIVHK

SEQ ID NO: 414 - protein, 9 aa, Homo sapiens
DPTPEQTHR

SEQ ID NO: 415 - protein, 10 aa, Homo sapiens
GHFSISIPVK

SEQ ID NO: 416 - protein, 9 aa, Homo sapiens
IDQNVEELK

SEQ ID NO: 417 - protein, 11 aa, Homo sapiens
ATWSGAVLAGR

SEQ ID NO: 418 - protein, 10 aa, Homo sapiens
LDAQASFLPK

SEQ ID NO: 419 - protein, 8 aa, Homo sapiens
WERPFEVK

SEQ ID NO: 420 - protein, 9 aa, Homo sapiens
IDQTVEELR

SEQ ID NO: 421 - protein, 11 aa, Homo sapiens
DSSVPNTGTAR

SEQ ID NO: 422 - protein, 9 aa, Homo sapiens
LEPYADQLR

SEQ ID NO: 423 - protein, 9 aa, Homo sapiens
DSYDLHDLK

SEQ ID NO: 424 - protein, 17 aa, Homo sapiens
SVSDGIAALDLNAVANK

SEQ ID NO: 425 - protein, 9 aa, Homo sapiens
EYHFGQAVR

SEQ ID NO: 426 - protein, 9 aa, Homo sapiens
ENSQYQPIK

SEQ ID NO: 427 - protein, 9 aa, Homo sapiens
VQHIQLLQK

SEQ ID NO: 428 - protein, 10 aa, Homo sapiens
LSITGTYDLK

SEQ ID NO: 429 - protein, 10 aa, Homo sapiens
VLLDGVQNPR

SEQ ID NO: 430 - protein, 9 aa, Homo sapiens
LEEQAQQIR

SEQ ID NO: 431 - protein, 10 aa, Homo sapiens
LLDSLPSDTR

SEQ ID NO: 432 - protein, 10 aa, Homo sapiens
SIYKPGQTVK

SEQ ID NO: 433 - protein, 20 aa, Homo sapiens
FLHVPDTFEGHFDGVPVISK

SEQ ID NO: 434 - protein, 10 aa, Homo sapiens
DADPDTFFAK

SEQ ID NO: 435 - protein, 10 aa, Homo sapiens
DAQYAPGYDK

SEQ ID NO: 436 - protein, 9 aa, Homo sapiens
EFDHNSNIR

SEQ ID NO: 437 - protein, 14 aa, Homo sapiens
HLIDSLIDFLNFPR

SEQ ID NO: 438 - protein, 10 aa, Homo sapiens
QGFFPDSVNK

SEQ ID NO: 439 - protein, 10 aa, Homo sapiens
EVYGFNPEGK

SEQ ID NO: 440 - protein, 8 aa, Homo sapiens
FYYIYNEK

SEQ ID NO: 441 - protein, 11 aa, Homo sapiens
GSESGIFTNTK

SEQ ID NO: 442 - protein, 10 aa, Homo sapiens
EAQLPVIENK

SEQ ID NO: 443 - protein, 11 aa, Homo sapiens
GGYTLVSGYPK

SEQ ID NO: 444 - protein, 9 aa, Homo sapiens
HINIDQFVR

SEQ ID NO: 445 - protein, 12 aa, Homo sapiens
GPDVLTATVSGK

SEQ ID NO: 446 - protein, 16 aa, Homo sapiens
DALSSVQESQVAQQAR

SEQ ID NO: 447 - protein, 10 aa, Homo sapiens
HYEGSTVPEK

SEQ ID NO: 448 - protein, 10 aa, Homo sapiens
QGIPFFGQVR

SEQ ID NO: 449 - protein, 10 aa, Homo sapiens
HQQTVTIPPK

SEQ ID NO: 450 - protein, 17 aa, Homo sapiens
VLSALQAVQGLLVAQGR

SEQ ID NO: 451 - protein, 9 aa, Homo sapiens
VLNYVDWIK

SEQ ID NO: 452 - protein, 10 aa, Homo sapiens
GEWVALNPLR

SEQ ID NO: 453 - protein, 10 aa, Homo sapiens
SPAFTDLHLR

SEQ ID NO: 454 - protein, 10 aa, Homo sapiens
VDTVDPPYPR

SEQ ID NO: 455 - protein, 10 aa, Homo sapiens
EVAFDLEIPK

SEQ ID NO: 456 - protein, 11 aa, Homo sapiens
AVVEVDESGTR

SEQ ID NO: 457 - protein, 16 aa, Homo sapiens
VNWEEEAASGLLTSLK

SEQ ID NO: 458 - protein, 11 aa, Homo sapiens
TSNFNAAISLK

SEQ ID NO: 459 - protein, 11 aa, Homo sapiens
HQTVPQNTGGK

SEQ ID NO: 460 - protein, 10 aa, Homo sapiens
THLPEVFLSK

SEQ ID NO: 461 - protein, 11 aa, Homo sapiens
TGLLLLSDPDK

SEQ ID NO: 462 - protein, 9 aa, Homo sapiens
YENYELTLK

SEQ ID NO: 463 - protein, 11 aa, Homo sapiens
VTVFPIGIGDR

SEQ ID NO: 464 - protein, 10 aa, Homo sapiens
DINYVNPVIK

SEQ ID NO: 465 - protein, 20 aa, Homo sapiens
QLVHHFEIDVDIFEPQGISK

SEQ ID NO: 466 - protein, 11 aa, Homo sapiens
GNVATEISTER

SEQ ID NO: 467 - protein, 10 aa, Homo sapiens
LNNGEITQHR

SEQ ID NO: 468 - protein, 15 aa, Homo sapiens
LYLVQGTQVYVFLTK

SEQ ID NO: 469 - protein, 10 aa, Homo sapiens
IQNILTEEPK

SEQ ID NO: 470 - protein, 11 aa, Homo sapiens
SNTVASLHTEK

SEQ ID NO: 471 - protein, 15 aa, Homo sapiens
TDTSHHDQDHPTFNK

SEQ ID NO: 472 - protein, 10 aa, Homo sapiens
DFDFVPPVVR

SEQ ID NO: 473 - protein, 10 aa, Homo sapiens
VEPYGENFNK

SEQ ID NO: 474 - protein, 16 aa, Homo sapiens
VVLHPNYSQVDIGLIK

SEQ ID NO: 475 - protein, 9 aa, Homo sapiens
EWFSETFQK

SEQ ID NO: 476 - protein, 10 aa, Homo sapiens
LTISEQNIQR

SEQ ID NO: 477 - protein, 10 aa, Homo sapiens
EYTDASFTNR

SEQ ID NO: 478 - protein, 15 aa, Homo sapiens
AEDHFSVIDFNQNIR

SEQ ID NO: 479 - protein, 10 aa, Homo sapiens
VTSIQDWVQK

SEQ ID NO: 480 - protein, 16 aa, Homo sapiens
SPEQQETVLDGNLIIR

SEQ ID NO: 481 - protein, 16 aa, Homo sapiens
SNLDEDIIAEENIVSR

SEQ ID NO: 482 - protein, 11 aa, Homo sapiens
ITLLSALVETR

SEQ ID NO: 483 - protein, 11 aa, Homo sapiens
YNALDLTNNGK

SEQ ID NO: 484 - protein, 11 aa, Homo sapiens
ESYSGVTLDPR

SEQ ID NO: 485 - protein, 10 aa, Homo sapiens
DDEEFIESNK

SEQ ID NO: 486 - protein, 16 aa, Homo sapiens
VHQYFNVELIQPGAVK

SEQ ID NO: 487 - protein, 11 aa, Homo sapiens
QGLLPVLESFK

SEQ ID NO: 488 - protein, 11 aa, Homo sapiens
ENFAGEATLQR

SEQ ID NO: 489 - protein, 10 aa, Homo sapiens
EDEDFQESNK

SEQ ID NO: 490 - protein, 11 aa, Homo sapiens
LSPIYNLVPVK

SEQ ID NO: 491 - protein, 10 aa, Homo sapiens
IDDIWNLEVK

SEQ ID NO: 492 - protein, 10 aa, Homo sapiens
QQTEWQSGQR

SEQ ID NO: 493 - protein, 16 aa, Homo sapiens
TELRPGETLNVNFLLR

SEQ ID NO: 494 - protein, 17 aa, Homo sapiens
LFDSDPITVTVPVEVSR

SEQ ID NO: 495 - protein, 18 aa, Homo sapiens
VSVQLEASPAFLAVPVEK

SEQ ID NO: 496 - protein, 16 aa, Homo sapiens
DTEEEDFHVDQVTTVK

SEQ ID NO: 497 - protein, 11 aa, Homo sapiens
QELSEAEQATR

SEQ ID NO: 498 - protein, 11 aa, Homo sapiens
TNLESILSYPK

SEQ ID NO: 499 - protein, 12 aa, Homo sapiens
ALQDQLVLVAAK

SEQ ID NO: 500 - protein, 19 aa, Homo sapiens
AVLDVFEEGTEASAATAVK

SEQ ID NO: 501 - protein, 17 aa, Homo sapiens
VVLVSLQSGYLFIQTDK

SEQ ID NO: 502 - protein, 10 aa, Homo sapiens
WEAEPVYVQR

SEQ ID NO: 503 - protein, 11 aa, Homo sapiens
TEVIPPLIENR

SEQ ID NO: 504 - protein, 12 aa, Homo sapiens
ENEGFTVTAEGK

SEQ ID NO: 505 - protein, 11 aa, Homo sapiens
AGFSWIEVTFK

SEQ ID NO: 506 - protein, 17 aa, Homo sapiens
SLAELGGHLDQQVEEFR

SEQ ID NO: 507 - protein, 11 aa, Homo sapiens
ESLSSYWESAK

SEQ ID NO: 508 - protein, 12 aa, Homo sapiens
NTLELSNGVIVK

SEQ ID NO: 509 - protein, 11 aa, Homo sapiens
TQVNTQAEQLR

SEQ ID NO: 510 - protein, 12 aa, Homo sapiens
SGSDEVQVGQQR

SEQ ID NO: 511 - protein, 12 aa, Homo sapiens
DPTFIPAPIQAK

SEQ ID NO: 512 - protein, 11 aa, Homo sapiens
EFQVPTFTIPK

SEQ ID NO: 513 - protein, 21 aa, Homo sapiens
NPSSAGSWNSGSSGPGSTGNR

SEQ ID NO: 514 - protein, 12 aa, Homo sapiens
LVLLNAIYLSAK

SEQ ID NO: 515 - protein, 11 aa, Homo sapiens
ETYDFDIAVLR

SEQ ID NO: 516 - protein, 12 aa, Homo sapiens
IYGNQDTSSQLK

SEQ ID NO: 517 - protein, 18 aa, Homo sapiens
IHSGSFQSQVELSNDQEK

SEQ ID NO: 518 - protein, 18 aa, Homo sapiens
TLDLGENQLETLPPDLLR

SEQ ID NO: 519 - protein, 12 aa, Homo sapiens
INNQLTLDSNTK

SEQ ID NO: 520 - protein, 18 aa, Homo sapiens
LYHSEAFTVNFGDTEEAK

SEQ ID NO: 521 - protein, 19 aa, Homo sapiens
FDHTNSLNIAGLSLDFSSK

SEQ ID NO: 522 - protein, 17 aa, Homo sapiens
EDLIWELLNQAQEHFGK

SEQ ID NO: 523 - protein, 18 aa, Homo sapiens
NHLQLEGLFFTNGEHTSK

SEQ ID NO: 524 - protein, 13 aa, Homo sapiens
IAELSATAQEIIK

SEQ ID NO: 525 - protein, 13 aa, Homo sapiens
QAVDTAVDGVFIR

SEQ ID NO: 526 - protein, 12 aa, Homo sapiens
ASSIIDELFQDR

SEQ ID NO: 527 - protein, 13 aa, Homo sapiens
AASGTTGTYQEWK

SEQ ID NO: 528 - protein, 13 aa, Homo sapiens
TLADLTLLDSPIK

SEQ ID NO: 529 - protein, 19 aa, Homo sapiens
LHTEAQIQEEGTVVELTGR

SEQ ID NO: 530 - protein, 12 aa, Homo sapiens
QTIIVVLENVQR

SEQ ID NO: 531 - protein, 19 aa, Homo sapiens
VVNNSPQPQNVVFDVQIPK

SEQ ID NO: 532 - protein, 12 aa, Homo sapiens
HYDGSYSTFGER

SEQ ID NO: 533 - protein, 20 aa, Homo sapiens
AEEEHLGILGPQLHADVGDK

SEQ ID NO: 534 - protein, 19 aa, Homo sapiens
HNVYINGITYTPVSSTNEK

SEQ ID NO: 535 - protein, 13 aa, Homo sapiens
ALVEQGFTVPEIK

SEQ ID NO: 536 - protein, 13 aa, Homo sapiens
VAEGTQVLELPFK

SEQ ID NO: 537 - protein, 19 aa, Homo sapiens
DAPDHQELNLDVSLQLPSR

SEQ ID NO: 538 - protein, 19 aa, Homo sapiens
QLYNVEATSYALLALLQLK

SEQ ID NO: 539 - protein, 14 aa, Homo sapiens
IALGGLLFPASNLR

SEQ ID NO: 540 - protein, 13 aa, Homo sapiens
LNGEIQALELPQK

SEQ ID NO: 541 - protein, 13 aa, Homo sapiens
IAIANIIDEIIEK

SEQ ID NO: 542 - protein, 13 aa, Homo sapiens
TDAPDLPEENQAR

SEQ ID NO: 543 - protein, 22 aa, Homo sapiens
VPVAVQGEDTVQSLTQGDGVAK

SEQ ID NO: 544 - protein, 13 aa, Homo sapiens
DVVLTTTFVDDIK

SEQ ID NO: 545 - protein, 13 aa, Homo sapiens
QYYEGSEIVVAGR

SEQ ID NO: 546 - protein, 14 aa, Homo sapiens
IPIEDGSGEVVLSR

SEQ ID NO: 547 - protein, 12 aa, Homo sapiens
LSLEIEQLELQR

SEQ ID NO: 548 - protein, 20 aa, Homo sapiens
EDIPPADLSDQVPDTESETR

SEQ ID NO: 549 - protein, 20 aa, Homo sapiens
VPSYTLILPSLELPVLHVPR

SEQ ID NO: 550 - protein, 12 aa, Homo sapiens
ITFELVYEELLK

SEQ ID NO: 551 - protein, 15 aa, Homo sapiens
AATVGSLAGQPLQER

SEQ ID NO: 552 - protein, 15 aa, Homo sapiens
IGQDGISTSATTNLK

SEQ ID NO: 553 - protein, 14 aa, Homo sapiens
VSEADSSNADWVTK

SEQ ID NO: 554 - protein, 12 aa, Homo sapiens
ALYLQYTDETFR

SEQ ID NO: 555 - protein, 13 aa, Homo sapiens
GLIDEVNQDFTNR

SEQ ID NO: 556 - protein, 13 aa, Homo sapiens
AEPLAFTFSHDYK

SEQ ID NO: 557 - protein, 23 aa, Homo sapiens
AFLEVNEEGSEAAASTAVVIAGR

SEQ ID NO: 558 - protein, 20 aa, Homo sapiens
DYNLNDILLQLGIEEAFTSK

SEQ ID NO: 559 - protein, 22 aa, Homo sapiens
TPGAAANLELIFVGPQHAGNYR

SEQ ID NO: 560 - protein, 14 aa, Homo sapiens
VSITSITVENVFVK

SEQ ID NO: 561 - protein, 14 aa, Homo sapiens
ATVAVYLESLQDTK

SEQ ID NO: 562 - protein, 23 aa, Homo sapiens
VTTVASHTSDSDVPSGVTEVVVK

SEQ ID NO: 563 - protein, 14 aa, Homo sapiens
ITENDIQIALDDAK

SEQ ID NO: 564 - protein, 14 aa, Homo sapiens
FPSGTFEQVSQLVK

SEQ ID NO: 565 - protein, 16 aa, Homo sapiens
GGSTSYGTGSETESPR

SEQ ID NO: 566 - protein, 13 aa, Homo sapiens
QEDDLANINQWVK

SEQ ID NO: 567 - protein, 13 aa, Homo sapiens
DTVFALVNYIFFK

SEQ ID NO: 568 - protein, 22 aa, Homo sapiens
VPTADLEDVLPLAEDITNILSK

SEQ ID NO: 569 - protein, 14 aa, Homo sapiens
LEQGENVFLQATDK

SEQ ID NO: 570 - protein, 14 aa, Homo sapiens
VLLDQLGTTISFER

SEQ ID NO: 571 - protein, 20 aa, Homo sapiens
AYIFIDEAHITQALIWLSQR

SEQ ID NO: 572 - protein, 15 aa, Homo sapiens
VSALLTPAEQTGTWK

SEQ ID NO: 573 - protein, 28 aa, Homo sapiens
DGWHSWPIAHQWPQGPSAVDAAFSWEEK

SEQ ID NO: 574 - protein, 22 aa, Homo sapiens
QGPVNLLSDPEQGVEVTGQYER

SEQ ID NO: 575 - protein, 14 aa, Homo sapiens
LLDNWDSVTSTFSK

SEQ ID NO: 576 - protein, 17 aa, Homo sapiens
VQAAVGTSAAPVPSDNH

SEQ ID NO: 577 - protein, 15 aa, Homo sapiens
VTEPISAESGEQVER

SEQ ID NO: 578 - protein, 24 aa, Homo sapiens
ADSQAQLLLSTVVGVFTAPGLHLK

SEQ ID NO: 579 - protein, 15 aa, Homo sapiens
FVTVQATFGTQVVEK

SEQ ID NO: 580 - protein, 23 aa, Homo sapiens
GPEEEHLGILGPVIWAEVGDTIR

SEQ ID NO: 581 - protein, 16 aa, Homo sapiens
GIISALLVPPETEEAK

SEQ ID NO: 582 - protein, 14 aa, Homo sapiens
SLEYLDLSFNQIAR

SEQ ID NO: 583 - protein, 16 aa, Homo sapiens
GFSLDEATNLNGGLLR

SEQ ID NO: 584 - protein, 15 aa, Homo sapiens
NIQEYLSILTDPDGK

SEQ ID NO: 585 - protein, 24 aa, Homo sapiens
TLNQPDSQLQLTTGNGLFLSEGLK

SEQ ID NO: 586 - protein, 14 aa, Homo sapiens
IVQILPWEQNEQVK

SEQ ID NO: 587 - protein, 15 aa, Homo sapiens
SELEEQLTPVAEETR

SEQ ID NO: 588 - protein, 14 aa, Homo sapiens
LQDFSDQLSDYYEK

SEQ ID NO: 589 - protein, 16 aa, Homo sapiens
SNALDIIFQTDLTGQK

SEQ ID NO: 590 - protein, 16 aa, Homo sapiens
EIPAWVPFDPAAQITK

SEQ ID NO: 591 - protein, 22 aa, Homo sapiens
EFYLFPTVFDENESLLLEDNIR

SEQ ID NO: 592 - protein, 23 aa, Homo sapiens
WVQTLSEQVQEELLSSQVTQELR

SEQ ID NO: 593 - protein, 16 aa, Homo sapiens
ATFQTPDFIVPLTDLR

SEQ ID NO: 594 - protein, 16 aa, Homo sapiens
EAGIPEFYDYDVALIK

SEQ ID NO: 595 - protein, 16 aa, Homo sapiens
QFSFPLSSEPFQGSYK

SEQ ID NO: 596 - protein, 25 aa, Homo sapiens
ITDVIPSEAINELTVLVLVNTIYFK

SEQ ID NO: 597 - protein, 16 aa, Homo sapiens
EYVLPSFEVIVEPTEK

SEQ ID NO: 598 - protein, 25 aa, Homo sapiens
YHFEALADTGISSEFYDNANDLLSK

SEQ ID NO: 599 - protein, 16 aa, Homo sapiens
IFFYDSENPPASEVLR

SEQ ID NO: 600 - protein, 17 aa, Homo sapiens
SDVGFLPPFPTLDPEEK

SEQ ID NO: 601 - protein, 18 aa, Homo sapiens
LYGSEAFATDFQDSAAAK

SEQ ID NO: 602 - protein, 18 aa, Homo sapiens
FNAVLTNPQGDYDTSTGK

SEQ ID NO: 603 - protein, 19 aa, Homo sapiens
VVAEGFDFANGINISPDGK

SEQ ID NO: 604 - protein, 28 aa, Homo sapiens
FSSHVGGTLGQFYQEVLWGSPAASDDGR

SEQ ID NO: 605 - protein, 16 aa, Homo sapiens
LPQQANDYLNSFNWER

SEQ ID NO: 606 - protein, 20 aa, Homo sapiens
YEDGTLSLTSTSDLQSGIIK

SEQ ID NO: 607 - protein, 11 aa, Homo sapiens
ADIGCTPGSGK

SEQ ID NO: 608 - protein, 17 aa, Homo sapiens
AEQCCEETASSISLHGK

SEQ ID NO: 609 - protein, 14 aa, Homo sapiens
AESPEVCFNEESPK

SEQ ID NO: 610 - protein, 9 aa, Homo sapiens
AFDICPLVK

SEQ ID NO: 611 - protein, 8 aa, Homo sapiens
ASYLDCIR

SEQ ID NO: 612 - protein, 19 aa, Homo sapiens
ATTVTGTPCQDWAAQEPHR

SEQ ID NO: 613 - protein, 12 aa, Homo sapiens
AYLEEECPATLR

SEQ ID NO: 614 - protein, 10 aa, Homo sapiens
CAEENCFIQK

SEQ ID NO: 615 - protein, 8 aa, Homo sapiens
CAGPEAVK

SEQ ID NO: 616 - protein, 11 aa, Homo sapiens
CDEWSVNSVGK

SEQ ID NO: 617 - protein, 10 aa, Homo sapiens
CEEDEEFTCR

SEQ ID NO: 618 - protein, 16 aa, Homo sapiens
CEWETPEGCEQVLTGK

SEQ ID NO: 619 - protein, 14 aa, Homo sapiens
CFEGFGIDGPAIAK

SEQ ID NO: 620 - protein, 8 aa, Homo sapiens
CFEPQLLR

SEQ ID NO: 621 - protein, 18 aa, Homo sapiens
CGPCFNNGVPILEGTSCR

SEQ ID NO: 622 - protein, 19 aa, Homo sapiens
CHPGYKPTTDEPTTVICQK

SEQ ID NO: 623 - protein, 9 aa, Homo sapiens
CLAPLEGAR

SEQ ID NO: 624 - protein, 8 aa, Homo sapiens
CLCACPFK

SEQ ID NO: 625 - protein, 11 aa, Homo sapiens
CLPVTAPENGK

SEQ ID NO: 626 - protein, 8 aa, Homo sapiens
CLVNLIEK

SEQ ID NO: 627 - protein, 13 aa, Homo sapiens
CSTSSLLEACTFR

SEQ ID NO: 628 - protein, 9 aa, Homo sapiens
CTEGFNVDK

SEQ ID NO: 629 - protein, 12 aa, Homo sapiens
CTLKPCDYPDIK

SEQ ID NO: 630 - protein, 11 aa, Homo sapiens
CTSTGWIPAPR

SEQ ID NO: 631 - protein, 7 aa, Homo sapiens
CVEISCK

SEQ ID NO: 632 - protein, 9 aa, Homo sapiens
CVPVCGVPR

SEQ ID NO: 633 - protein, 15 aa, Homo sapiens
DCHLAQVPSHTVVAR

SEQ ID NO: 634 - protein, 8 aa, Homo sapiens
DDTVCLAK

SEQ ID NO: 635 - protein, 12 aa, Homo sapiens
DEELSCTVVELK

SEQ ID NO: 636 - protein, 10 aa, Homo sapiens
DFTCVHQALK

SEQ ID NO: 637 - protein, 11 aa, Homo sapiens
DGWSAQPTCIK

SEQ ID NO: 638 - protein, 16 aa, Homo sapiens
DICEEQVNSLPGSITK

SEQ ID NO: 639 - protein, 7 aa, Homo sapiens
DLGQCDR

SEQ ID NO: 640 - protein, 20 aa, Homo sapiens
DLTGFPGPLNDQDNEDCINR

SEQ ID NO: 641 - protein, 14 aa, Homo sapiens
DLYSGLIGPLIVCR

SEQ ID NO: 642 - protein, 12 aa, Homo sapiens
DQYELLCLDNTR

SEQ ID NO: 643 - protein, 10 aa, Homo sapiens
DSCVGSLVVK

SEQ ID NO: 644 - protein, 15 aa, Homo sapiens
DSDWPFCSDEDWNYK

SEQ ID NO: 645 - protein, 17 aa, Homo sapiens
DTYFVTGIVSWGEGCAR

SEQ ID NO: 646 - protein, 9 aa, Homo sapiens
DVCDPGNTK

SEQ ID NO: 647 - protein, 11 aa, Homo sapiens
DYELLCLDGTR

SEQ ID NO: 648 - protein, 18 aa, Homo sapiens
ECDTDGWTNDIPICEVVK

SEQ ID NO: 649 - protein, 9 aa, Homo sapiens
EEIIYECDK

SEQ ID NO: 650 - protein, 16 aa, Homo sapiens
EGTCPEAPTDECKPVK

SEQ ID NO: 651 - protein, 12 aa, Homo sapiens
EGWIHTVCINGR

SEQ ID NO: 652 - protein, 14 aa, Homo sapiens
EHAVEGDCDFQLLK

SEQ ID NO: 653 - protein, 16 aa, Homo sapiens
EILSVDCSTNNPSQAK

SEQ ID NO: 654 - protein, 14 aa, Homo sapiens
EQLGEFYEALDCLR

SEQ ID NO: 655 - protein, 14 aa, Homo sapiens
EVGPTNADPVCLAK

SEQ ID NO: 656 - protein, 24 aa, Homo sapiens
EVGTPHGIILDSVDAAFICPGSSR

SEQ ID NO: 657 - protein, 14 aa, Homo sapiens
EVQPVELPNCNLVK

SEQ ID NO: 658 - protein, 22 aa, Homo sapiens
EVVSLTEACCAEGADPDCYDTR

SEQ ID NO: 659 - protein, 15 aa, Homo sapiens
EYCGVPGDGDEELLR

SEQ ID NO: 660 - protein, 15 aa, Homo sapiens
FCGQLGSPLGNPPGK

SEQ ID NO: 661 - protein, 14 aa, Homo sapiens
FDEFFSEGCAPGSK

SEQ ID NO: 662 - protein, 8 aa, Homo sapiens
FEDCCQEK

SEQ ID NO: 663 - protein, 9 aa, Homo sapiens
FISLGEACK

SEQ ID NO: 664 - protein, 14 aa, Homo sapiens
FSAICQGDGTWSPR

SEQ ID NO: 665 - protein, 19 aa, Homo sapiens
FSEEACAVLTSPTFEACHR

SEQ ID NO: 666 - protein, 17 aa, Homo sapiens
FSPATHPSEGLEENYCR

SEQ ID NO: 667 - protein, 11 aa, Homo sapiens
FTDSENVCQER

SEQ ID NO: 668 - protein, 8 aa, Homo sapiens
FVCNSGYK

SEQ ID NO: 669 - protein, 17 aa, Homo sapiens
GECVPGEQEPEPILIPR

SEQ ID NO: 670 - protein, 9 aa, Homo sapiens
GQCIINSNK

SEQ ID NO: 671 - protein, 20 aa, Homo sapiens
GQPSVLQVVNLPIVERPVCK

SEQ ID NO: 672 - protein, 12 aa, Homo sapiens
GSSVIHCDADSK

SEQ ID NO: 673 - protein, 12 aa, Homo sapiens
GVCEETSGAYEK

SEQ ID NO: 674 - protein, 16 aa, Homo sapiens
HQDFNSAVQLVENFCR

SEQ ID NO: 675 - protein, 19 aa, Homo sapiens
HSITNPLAVLCEFISQSIK

SEQ ID NO: 676 - protein, 8 aa, Homo sapiens
HVAEAICK

SEQ ID NO: 677 - protein, 8 aa, Homo sapiens
HVCGALLK

SEQ ID NO: 678 - protein, 15 aa, Homo sapiens
IECVSAETTEDCIAK

SEQ ID NO: 679 - protein, 17 aa, Homo sapiens
KPVAFSDYIHPVCLPDR

SEQ ID NO: 680 - protein, 13 aa, Homo sapiens
KPVEEYANCHLAR

SEQ ID NO: 681 - protein, 18 aa, Homo sapiens
LAACLEGNCAEGLGTNYR

SEQ ID NO: 682 - protein, 19 aa, Homo sapiens
LAVTTHGLPCLAWASAQAK

SEQ ID NO: 683 - protein, 17 aa, Homo sapiens
LGSLGAACEQTQTEGAK

SEQ ID NO: 684 - protein, 18 aa, Homo sapiens
LGYVTADGETSGSITCGK

SEQ ID NO: 685 - protein, 21 aa, Homo sapiens
LLQDEFPGIPSPLDAAVECHR

SEQ ID NO: 686 - protein, 26 aa, Homo sapiens
LPECEADDGCPKPPEIAHGYVEHSVR

SEQ ID NO: 687 - protein, 12 aa, Homo sapiens
LPLVPALDGCLR

SEQ ID NO: 688 - protein, 11 aa, Homo sapiens
LPPTTTCQQQK

SEQ ID NO: 689 - protein, 10 aa, Homo sapiens
LSYTCEGGFR

SEQ ID NO: 690 - protein, 13 aa, Homo sapiens
LVGITSWGEGCAR

SEQ ID NO: 691 - protein, 8 aa, Homo sapiens
NIGEFCGK

SEQ ID NO: 692 - protein, 8 aa, Homo sapiens
NLDENYCR

SEQ ID NO: 693 - protein, 13 aa, Homo sapiens
QLGAGSIEECAAK

SEQ ID NO: 694 - protein, 7 aa, Homo sapiens
QSWSVCK

SEQ ID NO: 695 - protein, 16 aa, Homo sapiens
SCDNPYIPNGDYSPLR

SEQ ID NO: 696 - protein, 10 aa, Homo sapiens
SCDTPPPCPR

SEQ ID NO: 697 - protein, 20 aa, Homo sapiens
SCESNSPFPVHPGTAECCTK

SEQ ID NO: 698 - protein, 26 aa, Homo sapiens
SDFASNCCSINSPPLYCDSEIDAELK

SEQ ID NO: 699 - protein, 19 aa, Homo sapiens
SEGSSVNLSPPLEQCVPDR

SEQ ID NO: 700 - protein, 14 aa, Homo sapiens
SVIPSDGPSVACVK

SEQ ID NO: 701 - protein, 17 aa, Homo sapiens
TFGSGEADCGLRPLFEK

SEQ ID NO: 702 - protein, 12 aa, Homo sapiens
TFTCTAAYPESK

SEQ ID NO: 703 - protein, 10 aa, Homo sapiens
TGESVEFVCK

SEQ ID NO: 704 - protein, 11 aa, Homo sapiens
TINPAVDHCCK

SEQ ID NO: 705 - protein, 21 aa, Homo sapiens
TPEVTCVVVDVSHEDPEVQFK

SEQ ID NO: 706 - protein, 12 aa, Homo sapiens
TPLGDTTHTCPR

SEQ ID NO: 707 - protein, 26 aa, Homo sapiens
TSESGTPSSSTPQENTISGYSLLTCK

SEQ ID NO: 708 - protein, 21 aa, Homo sapiens
TVVQPSVGAAAGPVVPPCPGR

SEQ ID NO: 709 - protein, 16 aa, Homo sapiens
VELLHNPAFCSLATTK

SEQ ID NO: 710 - protein, 21 aa, Homo sapiens
VFSLAVNLIAIDSQVLCGAVK

SEQ ID NO: 711 - protein, 7 aa, Homo sapiens
VNCLQTR

SEQ ID NO: 712 - protein, 12 aa, Homo sapiens
VSHSEDDCLAFK

SEQ ID NO: 713 - protein, 20 aa, Homo sapiens
VSVLCQENYLIQEGEEITCK

SEQ ID NO: 714 - protein, 7 aa, Homo sapiens
VYLSECK

SEQ ID NO: 715 - protein, 9 aa, Homo sapiens
WCALSHHER

SEQ ID NO: 716 - protein, 11 aa, Homo sapiens
WCAVSEHEATK

SEQ ID NO: 717 - protein, 8 aa, Homo sapiens
WELCDIPR

SEQ ID NO: 718 - protein, 13 aa, Homo sapiens
WSSPPQCEGLPCK

SEQ ID NO: 719 - protein, 10 aa, Homo sapiens
YDVENCLANK

SEQ ID NO: 720 - protein, 18 aa, Homo sapiens
YSDASDCHGEDSQAFCEK

SEQ ID NO: 721 - protein, 8 aa, Homo sapiens
YTACETAR

SEQ ID NO: 722 - protein, 9 aa, Homo sapiens
YTCLPGYVR

SEQ ID NO: 723 - protein, 7 aa, Homo sapiens
YTVNQCR

SEQ ID NO: 724 - protein, 7 aa, Homo sapiens
AACLLPK

SEQ ID NO: 725 - protein, 12 aa, Homo sapiens
AAFTECCQAADK

SEQ ID NO: 726 - protein, 26 aa, Homo sapiens
AATPAAVTCQLSNWSEWTDCFPCQDK

SEQ ID NO: 727 - protein, 11 aa, Homo sapiens
ACEPGVDYVYK

SEQ ID NO: 728 - protein, 12 aa, Homo sapiens
ACIPTGPYPCGK

SEQ ID NO: 729 - protein, 15 aa, Homo sapiens
ADGSWSCWSSWSVCR

SEQ ID NO: 730 - protein, 30 aa, Homo sapiens
ADYVETVLDSTCSSTVQFLEYELNVLGTHK

SEQ ID NO: 731 - protein, 23 aa, Homo sapiens
AEEHTVVLTVTGEPCHFPFQYHR

SEQ ID NO: 732 - protein, 14 aa, Homo sapiens
AEGGQCPSLLFDLR

SEQ ID NO: 733 - protein, 8 aa, Homo sapiens
AEGLECTK

SEQ ID NO: 734 - protein, 11 aa, Homo sapiens
AELQCPQPAAR

SEQ ID NO: 735 - protein, 7 aa, Homo sapiens
AEYSPCR

SEQ ID NO: 736 - protein, 13 aa, Homo sapiens
AFTECCVVASQLR

SEQ ID NO: 737 - protein, 16 aa, Homo sapiens
AFTVCLHFYTELSSTR

SEQ ID NO: 738 - protein, 14 aa, Homo sapiens
AGEQVTYTCATYYK

SEQ ID NO: 739 - protein, 14 aa, Homo sapiens
AGLQAFFQVQECNK

SEQ ID NO: 740 - protein, 17 aa, Homo sapiens
AIDEDCSQYEPIPGSQK

SEQ ID NO: 741 - protein, 18 aa, Homo sapiens
AIHCPRPHDFENGEYWPR

SEQ ID NO: 742 - protein, 16 aa, Homo sapiens
ALPQPQNVTSLLGCTH

SEQ ID NO: 743 - protein, 21 aa, Homo sapiens
ALVLIAFAQYLQQCPFEDHVK

SEQ ID NO: 744 - protein, 11 aa, Homo sapiens
APTCGLCEVAR

SEQ ID NO: 745 - protein, 12 aa, Homo sapiens
APWCHTTNSQVR

SEQ ID NO: 746 - protein, 24 aa, Homo sapiens
AQLVPLPPSTYVEFTVSGTDCVAK

SEQ ID NO: 747 - protein, 7 aa, Homo sapiens
ASCYDGR

SEQ ID NO: 748 - protein, 17 aa, Homo sapiens
ATILCLLAWAGLAAGDR

SEQ ID NO: 749 - protein, 19 aa, Homo sapiens
ATTVTGTPCQEWAAQEPHR

SEQ ID NO: 750 - protein, 23 aa, Escherichia coli
AVVELHTADGTLIEAEACDVGFR

SEQ ID NO: 751 - protein, 18 aa, Homo sapiens
AVYTCNEGYQLLGEINYR

SEQ ID NO: 752 - protein, 6 aa, Homo sapiens
CASLQK

SEQ ID NO: 753 - protein, 13 aa, Homo sapiens
CCAAADPHECYAK

SEQ ID NO: 754 - protein, 9 aa, Homo sapiens
CCTESLVNR

SEQ ID NO: 755 - protein, 17 aa, Homo sapiens
CCYDGACVNNDETCEQR

SEQ ID NO: 756 - protein, 12 aa, Homo sapiens
CDSSPDSAEDVR

SEQ ID NO: 757 - protein, 14 aa, Homo sapiens
CEGPIPDVTFELLR

SEQ ID NO: 758 - protein, 7 aa, Homo sapiens
CELNCPK

SEQ ID NO: 759 - protein, 6 aa, Homo sapiens
CEYQIR

SEQ ID NO: 760 - protein, 13 aa, Homo sapiens
CGLVPVLAENYNK

SEQ ID NO: 761 - protein, 16 aa, Homo sapiens
CHPLVDPEPFVALCEK

SEQ ID NO: 762 - protein, 8 aa, Homo sapiens
CKPPPDIR

SEQ ID NO: 763 - protein, 7 aa, Homo sapiens
CLAEGGK

SEQ ID NO: 764 - protein, 10 aa, Homo sapiens
CLAYDFYPGK

SEQ ID NO: 765 - protein, 8 aa, Homo sapiens
CLEVEGHR

SEQ ID NO: 766 - protein, 23 aa, Homo sapiens
CLGYHLDVSLAFSEISVGAEFNK

SEQ ID NO: 767 - protein, 14 aa, Homo sapiens
CLPSACEVVTGSPR

SEQ ID NO: 768 - protein, 11 aa, Homo sapiens
CLPTACTIQLR

SEQ ID NO: 769 - protein, 15 aa, Homo sapiens
CLPVCGKPVNPVEQR

SEQ ID NO: 770 - protein, 25 aa, Homo sapiens
CNGDNDCGDFSDEDDCESEPRPPCR

SEQ ID NO: 771 - protein, 7 aa, Homo sapiens
CNLLAEK

SEQ ID NO: 772 - protein, 6 aa, Homo sapiens
CNYSIR

SEQ ID NO: 773 - protein, 8 aa, Homo sapiens
CPCFHQGK

SEQ ID NO: 774 - protein, 23 aa, Homo sapiens
CPGSIVGGCVAHPHSWPWQVSLR

SEQ ID NO: 775 - protein, 6 aa, Homo sapiens
CPSGCR

SEQ ID NO: 776 - protein, 8 aa, Homo sapiens
CQAYESNR

SEQ ID NO: 777 - protein, 27 aa, Homo sapiens
CQCDELCSYYQSCCTDYTAECKPQVTR

SEQ ID NO: 778 - protein, 13 aa, Homo sapiens
CQFFSYATQTFHK

SEQ ID NO: 779 - protein, 14 aa, Homo sapiens
CQFFTYSLLPEDCK

SEQ ID NO: 780 - protein, 16 aa, Homo sapiens
CQPVDCGIPESIENGK

SEQ ID NO: 781 - protein, 16 aa, Escherichia coli
CSHYPNHPLWYTLCDR

SEQ ID NO: 782 - protein, 28 aa, Homo sapiens
CSPHLVLSALTSDNHGATYAFSGTHYWR

SEQ ID NO: 783 - protein, 8 aa, Homo sapiens
CTDAVGDR

SEQ ID NO: 784 - protein, 6 aa, Homo sapiens
CTFHPR

SEQ ID NO: 785 - protein, 6 aa, Homo sapiens
CTNNIR

SEQ ID NO: 786 - protein, 16 aa, Homo sapiens
CTTPPPSSGPTYQCLK

SEQ ID NO: 787 - protein, 6 aa, Homo sapiens
CVALER

SEQ ID NO: 788 - protein, 15 aa, Homo sapiens
CVLFPYGGCQGNGNK

SEQ ID NO: 789 - protein, 6 aa, Homo sapiens
DAVCTR

SEQ ID NO: 790 - protein, 21 aa, Homo sapiens
DCDDVLQTHPSGTQSGIFNIK

SEQ ID NO: 791 - protein, 6 aa, Homo sapiens
DCGQPR

SEQ ID NO: 792 - protein, 8 aa, Homo sapiens
DCNTCICR

SEQ ID NO: 793 - protein, 20 aa, Homo sapiens
DCQDHSFSIVIETVQCADDR

SEQ ID NO: 794 - protein, 6 aa, Homo sapiens
DCQVFR

SEQ ID NO: 795 - protein, 14 aa, Homo sapiens
DETLQDGCDTHFCK

SEQ ID NO: 796 - protein, 15 aa, Homo sapiens
DGDQCETSPCQNQGK

SEQ ID NO: 797 - protein, 21 aa, Homo sapiens
DGFDISGNPWICDQNLSDLYR

SEQ ID NO: 798 - protein, 20 aa, Homo sapiens
DGHVILQLNSIPSSDFLCVR

SEQ ID NO: 799 - protein, 17 aa, Homo sapiens
DGLGEYTCTCLEGFEGK

SEQ ID NO: 800 - protein, 14 aa, Homo sapiens
DIASGLIGPLIICK

SEQ ID NO: 801 - protein, 17 aa, Homo sapiens
DITTCFGGSLGIQYEDK

SEQ ID NO: 802 - protein, 23 aa, Homo sapiens
DLCGCYSVSSVLPGCAEPWNHGK

SEQ ID NO: 803 - protein, 7 aa, Homo sapiens
DQLTCNK

SEQ ID NO: 804 - protein, 6 aa, Homo sapiens
DSSLCK

SEQ ID NO: 805 - protein, 18 aa, Homo sapiens
DTSCVNPPTVQNAYIVSR

SEQ ID NO: 806 - protein, 26 aa, Homo sapiens
DTTCSSCQAFLANLDEFAEDIFLNGC

SEQ ID NO: 807 - protein, 20 aa, Homo sapiens
DTWVEHWPEEDECQDEENQK

SEQ ID NO: 808 - protein, 17 aa, Homo sapiens
DVVQITCLDGFEVVEGR

SEQ ID NO: 809 - protein, 8 aa, Homo sapiens
DYFIATCK

SEQ ID NO: 810 - protein, 6 aa, Homo sapiens
EACVHK

SEQ ID NO: 811 - protein, 16 aa, Homo sapiens
EAQLLVIENEVCNHYK

SEQ ID NO: 812 - protein, 10 aa, Homo sapiens
ECCEKPLLEK

SEQ ID NO: 813 - protein, 17 aa, Homo sapiens
ECDNPAPQNGGASCPGR

SEQ ID NO: 814 - protein, 6 aa, Homo sapiens
ECELPK

SEQ ID NO: 815 - protein, 17 aa, Homo sapiens
ECLCGALASYAAACAGR

SEQ ID NO: 816 - protein, 7 aa, Homo sapiens
ECLQTCR

SEQ ID NO: 817 - protein, 28 aa, Homo sapiens
ECVEETCSYEEAFEALESSTATDVFWAK

SEQ ID NO: 818 - protein, 25 aa, Homo sapiens
EDFDVEAADSAGNCLDSLVFVAGDR

SEQ ID NO: 819 - protein, 20 aa, Homo sapiens
EEFPFALGVQTLPQTCDEPK

SEQ ID NO: 820 - protein, 11 aa, Homo sapiens
EENNTGECCGR

SEQ ID NO: 821 - protein, 16 aa, Homo sapiens
EEYGHSEVVEYYCNPR

SEQ ID NO: 822 - protein, 19 aa, Homo sapiens
EFNAETFTFHADICTLSEK

SEQ ID NO: 823 - protein, 26 aa, Homo sapiens
ELISLVEDVSSNYDGCCEGDVVQCIR

SEQ ID NO: 824 - protein, 13 aa, Homo sapiens
ELRPWCFTTDPNK

SEQ ID NO: 825 - protein, 9 aa, Homo sapiens
ENGYECEWR

SEQ ID NO: 826 - protein, 9 aa, Homo sapiens
ENLCLNLHK

SEQ ID NO: 827 - protein, 20 aa, Homo sapiens
EPCVESLVSQYFQTVTDYGK

SEQ ID NO: 828 - protein, 12 aa, Homo sapiens
EQAPHCICANGR

SEQ ID NO: 829 - protein, 18 aa, Homo sapiens
EQDLEVILHNGACSPGAR

SEQ ID NO: 830 - protein, 18 aa, Homo sapiens
EQVQSCGPPPELLNGNVK

SEQ ID NO: 831 - protein, 16 aa, Homo sapiens
ESEQGVYTCTAQGIWK

SEQ ID NO: 832 - protein, 9 aa, Homo sapiens
ETCFAEEGK

SEQ ID NO: 833 - protein, 22 aa, Homo sapiens
ETTFNSLLCPSGGEVSEELSLK

SEQ ID NO: 834 - protein, 22 aa, Homo sapiens
FAGVLLALALILPGTLCAEGTR

SEQ ID NO: 835 - protein, 10 aa, Homo sapiens
FEGIACEISK

SEQ ID NO: 836 - protein, 9 aa, Homo sapiens
FGCEIENNR

SEQ ID NO: 837 - protein, 6 aa, Homo sapiens
FGCFLK

SEQ ID NO: 838 - protein, 24 aa, Homo sapiens
FGGTICSGDIWDQASCSSSTTCVR

SEQ ID NO: 839 - protein, 16 aa, Homo sapiens
FIQVGVISWGVVDVCK

SEQ ID NO: 840 - protein, 17 aa, Homo sapiens
FLCTGGVSPYADPNTCR

SEQ ID NO: 841 - protein, 27 aa, Homo sapiens
FLEPFDIDDHQQVHCPYDQLQIYANGK

SEQ ID NO: 842 - protein, 30 aa, Homo sapiens
FSCKPGFTIVGPNSVQCYHFGLSPDLPICK

SEQ ID NO: 843 - protein, 16 aa, Homo sapiens
FSGQLNSHGCFYQQVK

SEQ ID NO: 844 - protein, 30 aa, Homo sapiens
FSLLGHASISCTVENETIGVWRPSPPTCEK

SEQ ID NO: 845 - protein, 21 aa, Homo sapiens
FYAAGLVSWGPQCGTYGLYTR

SEQ ID NO: 846 - protein, 8 aa, Homo sapiens
GCSHPSVK

SEQ ID NO: 847 - protein, 22 aa, Homo sapiens
GCVLLSYLNETVTVSASLESVR

SEQ ID NO: 848 - protein, 19 aa, Homo sapiens
GDAVCTESGWRPLPSCEEK

SEQ ID NO: 849 - protein, 6 aa, Homo sapiens
GDCVPK

SEQ ID NO: 850 - protein, 19 aa, Homo sapiens
GDTSTIYTNCWVTGWGFSK

SEQ ID NO: 851 - protein, 15 aa, Homo sapiens
GECQAEGVLFFQGDR

SEQ ID NO: 852 - protein, 15 aa, Homo sapiens
GFCSANGITVSADQK

SEQ ID NO: 853 - protein, 17 aa, Homo sapiens
GFLAYYQAVDLDECASR

SEQ ID NO: 854 - protein, 28 aa, Homo sapiens
GHVLFRPTVSQQQSCPTCSTSLLNGHFK

SEQ ID NO: 855 - protein, 30 aa, Homo sapiens
GLQLPGCLALAALCSLVHSQHVFLAPQQAR

SEQ ID NO: 856 - protein, 21 aa, Homo sapiens
GLQPTLTNPGECRPNFTCACR

SEQ ID NO: 857 - protein, 14 aa, Homo sapiens
GLRPSCPNSQSPVK

SEQ ID NO: 858 - protein, 10 aa, Homo sapiens
GLWEQCQLLK

SEQ ID NO: 859 - protein, 25 aa, Homo sapiens
GNVAVTVSGHTCQHWSAQTPHTHNR

SEQ ID NO: 860 - protein, 8 aa, Homo sapiens
GPDAHCQR

SEQ ID NO: 861 - protein, 12 aa, Homo sapiens
GPWCFTTDPSVR

SEQ ID NO: 862 - protein, 17 aa, Homo sapiens
GQELCADYSENTFTEYK

SEQ ID NO: 863 - protein, 16 aa, Homo sapiens
GQVYLQCGTPCNLTCR

SEQ ID NO: 864 - protein, 10 aa, Homo sapiens
GQYCYELDEK

SEQ ID NO: 865 - protein, 20 aa, Homo sapiens
GRPGPQPWCATTPNFDQDQR

SEQ ID NO: 866 - protein, 9 aa, Homo sapiens
GTYGLSCQR

SEQ ID NO: 867 - protein, 15 aa, Homo sapiens
GVGWSHPLPQCEIVK

SEQ ID NO: 868 - protein, 11 aa, Homo sapiens
GVNVCQETCTK

SEQ ID NO: 869 - protein, 23 aa, Homo sapiens
HCDGNVSSCGDHPSEGCFCPPDK

SEQ ID NO: 870 - protein, 21 aa, Homo sapiens
HFCGGTLISPEWVLTAAHCLK

SEQ ID NO: 871 - protein, 30 aa, Homo sapiens
HLCGGSLIGHQWVLTAAHCFDGLPLQDVWR

SEQ ID NO: 872 - protein, 23 aa, Homo sapiens
HLVCNGDQDCLDGSDEDDCEDVR

SEQ ID NO: 873 - protein, 9 aa, Homo sapiens
HNFSHCCSK

SEQ ID NO: 874 - protein, 8 aa, Homo sapiens
HNSTGCLR

SEQ ID NO: 875 - protein, 22 aa, Homo sapiens
HQPQEFPTYVEPTNDEICEAFR

SEQ ID NO: 876 - protein, 6 aa, Homo sapiens
HQSACK

SEQ ID NO: 877 - protein, 21 aa, Homo sapiens
HSGEENFYAYGFSVTYSCDPR

SEQ ID NO: 878 - protein, 6 aa, Homo sapiens
HSPCQK

SEQ ID NO: 879 - protein, 6 aa, Homo sapiens
ICPNCR

SEQ ID NO: 880 - protein, 19 aa, Homo sapiens
IFFHLNAVALGDGGHYTCR

SEQ ID NO: 881 - protein, 21 aa, Homo sapiens
IFSVYCDQETSLGGWLLIQQR

SEQ ID NO: 882 - protein, 11 aa, Homo sapiens
IGCNTCVCQDR

SEQ ID NO: 883 - protein, 13 aa, Escherichia coli
IGLNCQLAQVAER

SEQ ID NO: 884 - protein, 17 aa, Escherichia coli
IIFDGVNSAFHLWCNGR

SEQ ID NO: 885 - protein, 23 aa, Homo sapiens
ILDELLQTCVDPEDCPVCEVAGR

SEQ ID NO: 886 - protein, 18 aa, Homo sapiens
ILILGIFLFLCSTPAWAK

SEQ ID NO: 887 - protein, 12 aa, Homo sapiens
ILTSDVFQDCNK

SEQ ID NO: 888 - protein, 6 aa, Homo sapiens
INCQGK

SEQ ID NO: 889 - protein, 13 aa, Homo sapiens
INVGGGLSGDHCK

SEQ ID NO: 890 - protein, 18 aa, Homo sapiens
IPCSQPPQIEHGTINSSR

SEQ ID NO: 891 - protein, 20 aa, Homo sapiens
IPGTCCDTCEEPECNDITAR

SEQ ID NO: 892 - protein, 11 aa, Homo sapiens
IQYYCHEPYYK

SEQ ID NO: 893 - protein, 11 aa, Homo sapiens
IVACASYKPSR

SEQ ID NO: 894 - protein, 30 aa, Homo sapiens
IVCLVLSVVGTAWTADSGEGDFLAEGGGVR

SEQ ID NO: 895 - protein, 8 aa, Homo sapiens
IVGGQECK

SEQ ID NO: 896 - protein, 7 aa, Homo sapiens
LASQACR

SEQ ID NO: 897 - protein, 21 aa, Homo sapiens
LAVGALLVCAVLGLCLAVPDK

SEQ ID NO: 898 - protein, 8 aa, Homo sapiens
LCDNLSTK

SEQ ID NO: 899 - protein, 7 aa, Homo sapiens
LCFFYNK

SEQ ID NO: 900 - protein, 18 aa, Homo sapiens
LCHCPVGYTGAFCDVDTK

SEQ ID NO: 901 - protein, 13 aa, Homo sapiens
LCNTGDNSVCTTK

SEQ ID NO: 902 - protein, 11 aa, Homo sapiens
LCQDLGPGAFR

SEQ ID NO: 903 - protein, 7 aa, Homo sapiens
LCSGFVR

SEQ ID NO: 904 - protein, 26 aa, Homo sapiens
LCSLDNGDCDQFCHEEQNSVVCSCAR

SEQ ID NO: 905 - protein, 8 aa, Homo sapiens
LCTVATLR

SEQ ID NO: 906 - protein, 19 aa, Homo sapiens
LDYQEGPPGVEISCWSVEL

SEQ ID NO: 907 - protein, 11 aa, Homo sapiens
LEDSVTYHCSR

SEQ ID NO: 908 - protein, 7 aa, Homo sapiens
LFACSNK

SEQ ID NO: 909 - protein, 25 aa, Homo sapiens
LFDYCDIPLCASSSFDCGKPQVEPK

SEQ ID NO: 910 - protein, 26 aa, Homo sapiens
LFLGALPGEDSSTSFCLNGLWAQGQR

SEQ ID NO: 911 - protein, 24 aa, Homo sapiens
LGCEVLGVSVDSQFTHLAWINTPR

SEQ ID NO: 912 - protein, 10 aa, Homo sapiens
LHGDCQDLQK

SEQ ID NO: 913 - protein, 6 aa, Homo sapiens
LICNQK

SEQ ID NO: 914 - protein, 20 aa, Homo sapiens
LLAATVLLLTICSLEGALVR

SEQ ID NO: 915 - protein, 24 aa, Homo sapiens
LLQEGQALEYVCPSGFYPYPVQTR

SEQ ID NO: 916 - protein, 28 aa, Homo sapiens
LLSHCLLVTLAAHLPAEFTPAVHASLDK

SEQ ID NO: 917 - protein, 14 aa, Homo sapiens
LPVANPQACENWLR

SEQ ID NO: 918 - protein, 19 aa, Homo sapiens
LQAPLNYTEFQKPICLPSK

SEQ ID NO: 919 - protein, 27 aa, Homo sapiens
LQETSNWLLSQQQADGSFQDPCPVLDR

SEQ ID NO: 920 - protein, 19 aa, Homo sapiens
LQQVLHAGSGPCLPHLLSR

SEQ ID NO: 921 - protein, 16 aa, Homo sapiens
LSCSYSHWSAPAPQCK

SEQ ID NO: 922 - protein, 26 aa, Homo sapiens
LSWEYCDLAQCQTPTQAAPPTPVSPR

SEQ ID NO: 923 - protein, 8 aa, Escherichia coli
LTAACFDR

SEQ ID NO: 924 - protein, 13 aa, Homo sapiens
LTGSCSYVLFQNK

SEQ ID NO: 925 - protein, 16 aa, Homo sapiens
LTLQGIISWGSGCGDR

SEQ ID NO: 926 - protein, 9 aa, Homo sapiens
LVCPADNLR

SEQ ID NO: 927 - protein, 20 aa, Homo sapiens
LVFQQFDLEPSEGCFYDYVK

SEQ ID NO: 928 - protein, 25 aa, Homo sapiens
LYDYCDVPQCAAPSFDCGKPQVEPK

SEQ ID NO: 929 - protein, 11 aa, Homo sapiens
NALFCLESAWK

SEQ ID NO: 930 - protein, 13 aa, Homo sapiens
NCCNTENPPGCYR

SEQ ID NO: 931 - protein, 7 aa, Homo sapiens
NCELFTR

SEQ ID NO: 932 - protein, 8 aa, Homo sapiens
NECFLQHK

SEQ ID NO: 933 - protein, 30 aa, Homo sapiens
NFPPSQDASGDLYTTSSQLTLPATQCLAGK

SEQ ID NO: 934 - protein, 7 aa, Homo sapiens
NGITCQK

SEQ ID NO: 935 - protein, 9 aa, Homo sapiens
NGPLSCGQR

SEQ ID NO: 936 - protein, 13 aa, Homo sapiens
NHSCEPCQTLAVR

SEQ ID NO: 937 - protein, 12 aa, Homo sapiens
NICFNIDSEPGK

SEQ ID NO: 938 - protein, 6 aa, Homo sapiens
NNCLLK

SEQ ID NO: 939 - protein, 13 aa, Homo sapiens
NPDAVAAPYCYTR

SEQ ID NO: 940 - protein, 17 aa, Homo sapiens
NPDGDVGGPWCYTTNPR

SEQ ID NO: 941 - protein, 15 aa, Homo sapiens
NPDNDIRPWCFVLNR

SEQ ID NO: 942 - protein, 18 aa, Homo sapiens
NPDNDPQGPWCYTTDPEK

SEQ ID NO: 943 - protein, 18 aa, Homo sapiens
NPDPVAAPWCYTTDPSVR

SEQ ID NO: 944 - protein, 13 aa, Homo sapiens
NPDPVAAPYCYTR

SEQ ID NO: 945 - protein, 19 aa, Homo sapiens
NPDSSTTGPWCYTTDPTVR

SEQ ID NO: 946 - protein, 24 aa, Homo sapiens
NSQWICSNEECPGECLVTGQSHFK

SEQ ID NO: 947 - protein, 6 aa, Homo sapiens
NVCLLK

SEQ ID NO: 948 - protein, 21 aa, Homo sapiens
NVSCPQLEVPVCPSGFQLSCK

SEQ ID NO: 949 - protein, 11 aa, Homo sapiens
NWGLGGHAFCR

SEQ ID NO: 950 - protein, 11 aa, Homo sapiens
QAQCGQDFQCK

SEQ ID NO: 951 - protein, 27 aa, Homo sapiens
QATYFISLFATVSCGCLTQLYENAFFR

SEQ ID NO: 952 - protein, 11 aa, Homo sapiens
QCGHQISACHR

SEQ ID NO: 953 - protein, 25 aa, Homo sapiens
QCVPTEPCEDAEDDCGNDFQCSTGR

SEQ ID NO: 954 - protein, 8 aa, Homo sapiens
QCVSPCAR

SEQ ID NO: 955 - protein, 11 aa, Homo sapiens
QCYHGNGQSYR

SEQ ID NO: 956 - protein, 15 aa, Homo sapiens
QDACQGDSGGVFAVR

SEQ ID NO: 957 - protein, 15 aa, Homo sapiens
QDQCIYNTTYLNVQR

SEQ ID NO: 958 - protein, 16 aa, Homo sapiens
QEDACQGDSGGPHVTR

SEQ ID NO: 959 - protein, 19 aa, Homo sapiens
QFGPYCGHGFPGPLNIETK

SEQ ID NO: 960 - protein, 28 aa, Homo sapiens
QGLGASVVSWSDVIVACAPWQHWNVLEK

SEQ ID NO: 961 - protein, 27 aa, Homo sapiens
QGYQLIEGNQVLHSFTAVCQDDGTWHR

SEQ ID NO: 962 - protein, 11 aa, Homo sapiens
QHSDPCALNPR

SEQ ID NO: 963 - protein, 29 aa, Homo sapiens
QNADQCCPEYECVCDPVSCDLPPVPHCER

SEQ ID NO: 964 - protein, 13 aa, Homo sapiens
QNCELFEQLGEYK

SEQ ID NO: 965 - protein, 29 aa, Homo sapiens
QPNCDDPETEEAALVAIDYINQNLPWGYK

SEQ ID NO: 966 - protein, 12 aa, Homo sapiens
QPWCYTTDPCVR

SEQ ID NO: 967 - protein, 21 aa, Homo sapiens
QQQHLFGSNVTDCSGNFCLFR

SEQ ID NO: 968 - protein, 13 aa, Homo sapiens
QTACKPEIAYAYK

SEQ ID NO: 969 - protein, 19 aa, Homo sapiens
QVLFLDTVYGNCSTHFTVK

SEQ ID NO: 970 - protein, 6 aa, Homo sapiens
QYGFCK

SEQ ID NO: 971 - protein, 8 aa, Homo sapiens
RPCFESLK

SEQ ID NO: 972 - protein, 16 aa, Homo sapiens
RPCFSALEVDETYVPK

SEQ ID NO: 973 - protein, 27 aa, Homo sapiens
RPCGHPGDTPFGTFTLTGGNVFEYGVK

SEQ ID NO: 974 - protein, 26 aa, Homo sapiens
RPGDVWTLPDQCHTVTCQPDGQTLLK

SEQ ID NO: 975 - protein, 22 aa, Homo sapiens
SAAPEQSHVVQDCYHGDGQSYR

SEQ ID NO: 976 - protein, 19 aa, Homo sapiens
SAGWNIPIGLLYCDLPEPR

SEQ ID NO: 977 - protein, 8 aa, Homo sapiens
SCCEEQNK

SEQ ID NO: 978 - protein, 23 aa, Homo sapiens
SCDVESNPGIFLPPGTQAEFNLR

SEQ ID NO: 979 - protein, 8 aa, Homo sapiens
SCHTAVGR

SEQ ID NO: 980 - protein, 8 aa, Homo sapiens
SCHTGLGR

SEQ ID NO: 981 - protein, 8 aa, Homo sapiens
SCVLPQTK

SEQ ID NO: 982 - protein, 19 aa, Homo sapiens
SDNCEDTPEAGYFAIAVVK

SEQ ID NO: 983 - protein, 11 aa, Homo sapiens
SEDCFILDHGK

SEQ ID NO: 984 - protein, 13 aa, Homo sapiens
SEVEVDIHYCQGK

SEQ ID NO: 985 - protein, 23 aa, Homo sapiens
SGAGTEDSACIPWAYYSTVDQVK

SEQ ID NO: 986 - protein, 15 aa, Homo sapiens
SGFTYVLHEGECCGR

SEQ ID NO: 987 - protein, 9 aa, Homo sapiens
SGIECQLWR

SEQ ID NO: 988 - protein, 21 aa, Homo sapiens
SHEIWTHSCPQSPGNGTDASH

SEQ ID NO: 989 - protein, 24 aa, Homo sapiens
SHSTQTLTCNSDGEWVYNTFCIYK

SEQ ID NO: 990 - protein, 15 aa, Homo sapiens
SIAQYWLGCPAPGHL

SEQ ID NO: 991 - protein, 14 aa, Homo sapiens
SIDVACHPGYALPK

SEQ ID NO: 992 - protein, 20 aa, Homo sapiens
SITCIHGVWTQLPQCVAIDK

SEQ ID NO: 993 - protein, 22 aa, Homo sapiens
SLFTDLEAENDVLHCVAFAVPK

SEQ ID NO: 994 - protein, 18 aa, Homo sapiens
SLGECCDVEDSTTCFNAK

SEQ ID NO: 995 - protein, 30 aa, Homo sapiens
SLGPNSCSANGPGLYLIHGPNLYCYSDVEK

SEQ ID NO: 996 - protein, 26 aa, Homo sapiens
SLVLLLCLAQLWGCHSAPHGPGLIYR

SEQ ID NO: 997 - protein, 28 aa, Homo sapiens
SPCYGYQWVSEEHEEAHHTAYLVFSPSK

SEQ ID NO: 998 - protein, 8 aa, Homo sapiens
SPPGVCSR

SEQ ID NO: 999 - protein, 15 aa, Homo sapiens
SPQELLCGASLISDR

SEQ ID NO: 1000 - protein, 13 aa, Homo sapiens
SPVVQDCYHGDGR

SEQ ID NO: 1001 - protein, 21 aa, Homo sapiens
SPYYNVSDEISFHCYDGYTLR

SEQ ID NO: 1002 - protein, 24 aa, Homo sapiens
SRPANHCVYFYGDEISFSCHETSR

SEQ ID NO: 1003 - protein, 20 aa, Homo sapiens
SVGSQWASPENPCLINECVR

SEQ ID NO: 1004 - protein, 13 aa, Homo sapiens
SWPAVGNCSSALR

SEQ ID NO: 1005 - protein, 12 aa, Homo sapiens
TATLCPQSCEER

SEQ ID NO: 1006 - protein, 26 aa, Homo sapiens
TCGLCGNYNGNQGDDFLTPSGLAEPR

SEQ ID NO: 1007 - protein, 7 aa, Homo sapiens
TCQVNGR

SEQ ID NO: 1008 - protein, 13 aa, Homo sapiens
TCVADESAENCDK

SEQ ID NO: 1009 - protein, 26 aa, Homo sapiens
TDLSFGSQIEFSCSEGFFLIGSTTSR

SEQ ID NO: 1010 - protein, 19 aa, Homo sapiens
TDLVFGTDVTCWFVHNSGK

SEQ ID NO: 1011 - protein, 21 aa, Homo sapiens
TECFITGWGETQGTFGAGLLK

SEQ ID NO: 1012 - protein, 21 aa, Homo sapiens
TECYITGWGETQGTFGTGLLK

SEQ ID NO: 1013 - protein, 10 aa, Homo sapiens
TGDEITYQCR

SEQ ID NO: 1014 - protein, 20 aa, Homo sapiens
TICTYHPNCLFFTFYTNVWK

SEQ ID NO: 1015 - protein, 21 aa, Homo sapiens
TLCECAGGLECACPALLEYAR

SEQ ID NO: 1016 - protein, 18 aa, Homo sapiens
TLGPSQEETGGVFLCPWR

SEQ ID NO: 1017 - protein, 7 aa, Homo sapiens
TLPECSK

SEQ ID NO: 1018 - protein, 9 aa, Homo sapiens
TLPEPCHSK

SEQ ID NO: 1019 - protein, 6 aa, Homo sapiens
TLYCEL

SEQ ID NO: 1020 - protein, 9 aa, Homo sapiens
TNGVCVDWR

SEQ ID NO: 1021 - protein, 9 aa, Homo sapiens
TNPCLHGGR

SEQ ID NO: 1022 - protein, 8 aa, Homo sapiens
TPENFPCK

SEQ ID NO: 1023 - protein, 16 aa, Homo sapiens
TPENYPNAGLTENYCR

SEQ ID NO: 1024 - protein, 13 aa, Homo sapiens
TPSCGDICNFPPK

SEQ ID NO: 1025 - protein, 15 aa, Homo sapiens
TPVGSCFLAQPESGR

SEQ ID NO: 1026 - protein, 9 aa, Homo sapiens
TSACCPSCR

SEQ ID NO: 1027 - protein, 7 aa, Homo sapiens
TSQCTLK

SEQ ID NO: 1028 - protein, 13 aa, Homo sapiens
TSTSEEVCSFYLK

SEQ ID NO: 1029 - protein, 6 aa, Homo sapiens
TTAVCR

SEQ ID NO: 1030 - protein, 11 aa, Homo sapiens
TTCNPCPLGYK

SEQ ID NO: 1031 - protein, 18 aa, Homo sapiens
TTLSGAPCQPWASEATYR

SEQ ID NO: 1032 - protein, 11 aa, Homo sapiens
TVAACNLPIVR

SEQ ID NO: 1033 - protein, 8 aa, Homo sapiens
TYCSEPEK

SEQ ID NO: 1034 - protein, 7 aa, Homo sapiens
VANPCVK

SEQ ID NO: 1035 - protein, 14 aa, Homo sapiens
VAQCSQKPCEDSCR

SEQ ID NO: 1036 - protein, 8 aa, Homo sapiens
VCEGAACK

SEQ ID NO: 1037 - protein, 15 aa, Homo sapiens
VCQDCPLLAPLNDTR

SEQ ID NO: 1038 - protein, 11 aa, Homo sapiens
VCSQYAAYGEK

SEQ ID NO: 1039 - protein, 8 aa, Homo sapiens
VEETCGCR

SEQ ID NO: 1040 - protein, 14 aa, Homo sapiens
VELEVPQLCSFILK

SEQ ID NO: 1041 - protein, 13 aa, Homo sapiens
VFLDCCNYITELR

SEQ ID NO: 1042 - protein, 15 aa, Homo sapiens
VGATSFYSTCQSNGK

SEQ ID NO: 1043 - protein, 17 aa, Homo sapiens
VHTECCHGDLLECADDR

SEQ ID NO: 1044 - protein, 16 aa, Homo sapiens
VIPACLPSPNYVVADR

SEQ ID NO: 1045 - protein, 10 aa, Homo sapiens
VLTPDAFVCR

SEQ ID NO: 1046 - protein, 17 aa, Homo sapiens
VLWAALLVTFLAGCQAK

SEQ ID NO: 1047 - protein, 12 aa, Homo sapiens
VNCTTQPCPTAK

SEQ ID NO: 1048 - protein, 13 aa, Homo sapiens
VNIPLVTNEECQK

SEQ ID NO: 1049 - protein, 23 aa, Homo sapiens
VPGLYYFVYHASHTANLCVLLYR

SEQ ID NO: 1050 - protein, 6 aa, Homo sapiens
VQTQAC

SEQ ID NO: 1051 - protein, 10 aa, Homo sapiens
VSPPSCPPHR

SEQ ID NO: 1052 - protein, 9 aa, Homo sapiens
VSSQCADTR

SEQ ID NO: 1053 - protein, 9 aa, Homo sapiens
VSSVEECQK

SEQ ID NO: 1054 - protein, 12 aa, Homo sapiens
VTAAPQSVCALR

SEQ ID NO: 1055 - protein, 15 aa, Homo sapiens
VTACHSSQPNATLYK

SEQ ID NO: 1056 - protein, 10 aa, Homo sapiens
VTCTNAELVK

SEQ ID NO: 1057 - protein, 11 aa, Homo sapiens
VTGCPPFDEHK

SEQ ID NO: 1058 - protein, 14 aa, Homo sapiens
VTGEGCVYLQTSLK

SEQ ID NO: 1059 - protein, 17 aa, Homo sapiens
VTLTCVAPLSGVDFQLR

SEQ ID NO: 1060 - protein, 19 aa, Homo sapiens
VVGGCVAHPHSWPWQVSLR

SEQ ID NO: 1061 - protein, 10 aa, Homo sapiens
VVTFCGHTSK

SEQ ID NO: 1062 - protein, 13 aa, Homo sapiens
VYAYYNLEESCTR

SEQ ID NO: 1063 - protein, 21 aa, Homo sapiens
VYDYYETDEFAIAEYNAPCSK

SEQ ID NO: 1064 - protein, 21 aa, Homo sapiens
VYIHPFHLVIHNESTCEQLAK

SEQ ID NO: 1065 - protein, 30 aa, Homo sapiens
VYLLSLLLIGFWDCVTCHGSPVDICTAKPR

SEQ ID NO: 1066 - protein, 23 aa, Homo sapiens
VYLQGLIDCYLFGNSSTVLEDSK

SEQ ID NO: 1067 - protein, 7 aa, Homo sapiens
WEYCNLK

SEQ ID NO: 1068 - protein, 8 aa, Homo sapiens
WGYCLEPK

SEQ ID NO: 1069 - protein, 10 aa, Homo sapiens
WQSIPLCVEK

SEQ ID NO: 1070 - protein, 25 aa, Homo sapiens
WSGQTAICDNGAGYCSNPGIPIGTR

SEQ ID NO: 1071 - protein, 9 aa, Homo sapiens
WSHPPSCIK

SEQ ID NO: 1072 - protein, 13 aa, Homo sapiens
WTCPCVCTGSSTR

SEQ ID NO: 1073 - protein, 8 aa, Homo sapiens
WTGRPTCR

SEQ ID NO: 1074 - protein, 16 aa, Homo sapiens
WTPYQGCEALCCPEPK

SEQ ID NO: 1075 - protein, 15 aa, Homo sapiens
WVATGIVSWGIGCSR

SEQ ID NO: 1076 - protein, 16 aa, Homo sapiens
WVLTAAHCLLYPPWDK

SEQ ID NO: 1077 - protein, 14 aa, Homo sapiens
WYNLAIGSTCPWLK

SEQ ID NO: 1078 - protein, 7 aa, Homo sapiens
YDSTCER

SEQ ID NO: 1079 - protein, 10 aa, Homo sapiens
YDVCSCSDGR

SEQ ID NO: 1080 - protein, 14 aa, Homo sapiens
YFTFSGICQYLLAR

SEQ ID NO: 1081 - protein, 18 aa, Homo sapiens
YGQTIRPICLPCTEGTTR

SEQ ID NO: 1082 - protein, 10 aa, Escherichia coli
YHYQLVWCQK

SEQ ID NO: 1083 - protein, 9 aa, Homo sapiens
YICAEHLAR

SEQ ID NO: 1084 - protein, 12 aa, Homo sapiens
YICENQDSISSK

SEQ ID NO: 1085 - protein, 24 aa, Homo sapiens
YILQGVTSWGLGCARPNKPGVYAR

SEQ ID NO: 1086 - protein, 24 aa, Homo sapiens
YILQGVTSWGLGCARPNKPGVYVR

SEQ ID NO: 1087 - protein, 24 aa, Homo sapiens
YLFPGECQYVLVQDYCGSNPGTFR

SEQ ID NO: 1088 - protein, 23 aa, Homo sapiens
YPHKPEINSTTHPGADLQENFCR

SEQ ID NO: 1089 - protein, 19 aa, Homo sapiens
YSLFCLGFGFDVSYAFLEK

SEQ ID NO: 1090 - protein, 28 aa, Homo sapiens
YVEQNQNSICNSLLWLVENYQLDNGSFK

SEQ ID NO: 1091 - protein, 25 aa, Homo sapiens
YVVLFFYPLDFTFVCPTEIIAFSNR

SEQ ID NO: 1092 - protein, 11 aa, Homo sapiens
YYCFQGNQFLR

SEQ ID NO: 1093 - protein, 6 aa, Homo sapiens
ELISER

SEQ ID NO: 1094 - protein, 6 aa, Homo sapiens
GSQYWR

SEQ ID NO: 1095 - protein, 6 aa, Homo sapiens
IVQIYK

SEQ ID NO: 1096 - protein, 6 aa, Homo sapiens
IYIHPR

SEQ ID NO: 1097 - protein, 6 aa, Homo sapiens
LQVIFK

SEQ ID NO: 1098 - protein, 6 aa, Homo sapiens
QNALLR

SEQ ID NO: 1099 - protein, 6 aa, Homo sapiens
TNFAFR

SEQ ID NO: 1100 - protein, 6 aa, Homo sapiens
WLNEQR

SEQ ID NO: 1101 - protein, 6 aa, Homo sapiens
AATASR

SEQ ID NO: 1102 - protein, 6 aa, Homo sapiens
ADTVAK

SEQ ID NO: 1103 - protein, 6 aa, Homo sapiens
AEEWGR

SEQ ID NO: 1104 - protein, 6 aa, Homo sapiens
AEFTGR

SEQ ID NO: 1105 - protein, 6 aa, Homo sapiens
AETGDK

SEQ ID NO: 1106 - protein, 6 aa, Homo sapiens
AGIQER

SEQ ID NO: 1107 - protein, 6 aa, Homo sapiens
AHLNIK

SEQ ID NO: 1108 - protein, 6 aa, Homo sapiens
AHYDLR

SEQ ID NO: 1109 - protein, 6 aa, Homo sapiens
ANIGPR

SEQ ID NO: 1110 - protein, 6 aa, Homo sapiens
AVGNLR

SEQ ID NO: 1111 - protein, 6 aa, Homo sapiens
DNLQHK

SEQ ID NO: 1112 - protein, 6 aa, Homo sapiens
DPNTDR

SEQ ID NO: 1113 - protein, 6 aa, Homo sapiens
DSLEFR

SEQ ID NO: 1114 - protein, 6 aa, Homo sapiens
DTIVFK

SEQ ID NO: 1115 - protein, 6 aa, Homo sapiens
EALQIK

SEQ ID NO: 1116 - protein, 6 aa, Homo sapiens
EILRPR

SEQ ID NO: 1117 - protein, 6 aa, Homo sapiens
EIQIYK

SEQ ID NO: 1118 - protein, 6 aa, Homo sapiens
ENGGAR

SEQ ID NO: 1119 - protein, 6 aa, Homo sapiens
FEEQQR

SEQ ID NO: 1120 - protein, 6 aa, Homo sapiens
FIAESK

SEQ ID NO: 1121 - protein, 6 aa, Homo sapiens
FLNDVK

SEQ ID NO: 1122 - protein, 6 aa, Homo sapiens
FQEEEK

SEQ ID NO: 1123 - protein, 6 aa, Homo sapiens
FSHVEK

SEQ ID NO: 1124 - protein, 6 aa, Homo sapiens
FSLDGK

SEQ ID NO: 1125 - protein, 6 aa, Homo sapiens
FWDYLR

SEQ ID NO: 1126 - protein, 6 aa, Homo sapiens
FYHPEK

SEQ ID NO: 1127 - protein, 6 aa, Homo sapiens
GAVDHK

SEQ ID NO: 1128 - protein, 6 aa, Homo sapiens
GEFVWK

SEQ ID NO: 1129 - protein, 6 aa, Homo sapiens
GEVPPR

SEQ ID NO: 1130 - protein, 6 aa, Escherichia coli
GGYADR

SEQ ID NO: 1131 - protein, 6 aa, Homo sapiens
GPLLNK

SEQ ID NO: 1132 - protein, 6 aa, Homo sapiens
GSWVNK

SEQ ID NO: 1133 - protein, 6 aa, Homo sapiens
GTFAHR

SEQ ID NO: 1134 - protein, 6 aa, Homo sapiens
HPGELR

SEQ ID NO: 1135 - protein, 6 aa, Homo sapiens
IASQVK

SEQ ID NO: 1136 - protein, 6 aa, Homo sapiens
IDGQFR

SEQ ID NO: 1137 - protein, 6 aa, Homo sapiens
IGDNLR

SEQ ID NO: 1138 - protein, 6 aa, Homo sapiens
IGGSYK

SEQ ID NO: 1139 - protein, 6 aa, Homo sapiens
IHVYEK

SEQ ID NO: 1140 - protein, 6 aa, Homo sapiens
IIGGQK

SEQ ID NO: 1141 - protein, 6 aa, Homo sapiens
IPSNPR

SEQ ID NO: 1142 - protein, 6 aa, Homo sapiens
IQIQEK

SEQ ID NO: 1143 - protein, 6 aa, Homo sapiens
ISLGPR

SEQ ID NO: 1144 - protein, 6 aa, Homo sapiens
IVSLIK

SEQ ID NO: 1145 - protein, 6 aa, Homo sapiens
KPNNGK

SEQ ID NO: 1146 - protein, 6 aa, Homo sapiens
LEDTPK

SEQ ID NO: 1147 - protein, 6 aa, Homo sapiens
LTALTK

SEQ ID NO: 1148 - protein, 6 aa, Escherichia coli
LTDDPR

SEQ ID NO: 1149 - protein, 6 aa, Homo sapiens
LTTNGR

SEQ ID NO: 1150 - protein, 6 aa, Homo sapiens
LVSANR

SEQ ID NO: 1151 - protein, 6 aa, Homo sapiens
LYSILK

SEQ ID NO: 1152 - protein, 6 aa, Homo sapiens
NAEELK

SEQ ID NO: 1153 - protein, 6 aa, Homo sapiens
NEIWYR

SEQ ID NO: 1154 - protein, 6 aa, Homo sapiens
NGISTK

SEQ ID NO: 1155 - protein, 6 aa, Homo sapiens
NIFNFK

SEQ ID NO: 1156 - protein, 6 aa, Homo sapiens
NPDADK

SEQ ID NO: 1157 - protein, 6 aa, Homo sapiens
NPDSGK

SEQ ID NO: 1158 - protein, 6 aa, Escherichia coli
NSEEAR

SEQ ID NO: 1159 - protein, 6 aa, Homo sapiens
NYQLYK

SEQ ID NO: 1160 - protein, 6 aa, Homo sapiens
QAPENK

SEQ ID NO: 1161 - protein, 6 aa, Homo sapiens
QHLFVK

SEQ ID NO: 1162 - protein, 6 aa, Homo sapiens
QSTLDK

SEQ ID NO: 1163 - protein, 6 aa, Homo sapiens
QTYQEK

SEQ ID NO: 1164 - protein, 6 aa, Homo sapiens
QVSHAK

SEQ ID NO: 1165 - protein, 6 aa, Homo sapiens
RPQDAK

SEQ ID NO: 1166 - protein, 6 aa, Homo sapiens
RPSELR

SEQ ID NO: 1167 - protein, 6 aa, Homo sapiens
SDTNGK

SEQ ID NO: 1168 - protein, 6 aa, Homo sapiens
SIIQEK

SEQ ID NO: 1169 - protein, 6 aa, Homo sapiens
SLNPNR

SEQ ID NO: 1170 - protein, 6 aa, Homo sapiens
SLVYLK

SEQ ID NO: 1171 - protein, 6 aa, Homo sapiens
SNHVSR

SEQ ID NO: 1172 - protein, 6 aa, Homo sapiens
SPFNNR

SEQ ID NO: 1173 - protein, 6 aa, Homo sapiens
SPYIDK

SEQ ID NO: 1174 - protein, 6 aa, Homo sapiens
STITYR

SEQ ID NO: 1175 - protein, 6 aa, Homo sapiens
SYNETK

SEQ ID NO: 1176 - protein, 6 aa, Homo sapiens
TAGLVR

SEQ ID NO: 1177 - protein, 6 aa, Homo sapiens
TDTDGK

SEQ ID NO: 1178 - protein, 6 aa, Homo sapiens
TGTTLK

SEQ ID NO: 1179 - protein, 6 aa, Homo sapiens
THPQFR

SEQ ID NO: 1180 - protein, 6 aa, Homo sapiens
TLDPER

SEQ ID NO: 1181 - protein, 6 aa, Escherichia coli
TLFISR

SEQ ID NO: 1182 - protein, 6 aa, Homo sapiens
TPITFR

SEQ ID NO: 1183 - protein, 6 aa, Homo sapiens
TSAGTR

SEQ ID NO: 1184 - protein, 6 aa, Homo sapiens
VANPSR

SEQ ID NO: 1185 - protein, 6 aa, Homo sapiens
VIGTLK

SEQ ID NO: 1186 - protein, 6 aa, Homo sapiens
VLDLTR

SEQ ID NO: 1187 - protein, 6 aa, Homo sapiens
VQISVK

SEQ ID NO: 1188 - protein, 6 aa, Homo sapiens
VTFHNK

SEQ ID NO: 1189 - protein, 6 aa, Homo sapiens
VVHAAK

SEQ ID NO: 1190 - protein, 6 aa, Homo sapiens
VWELSK

SEQ ID NO: 1191 - protein, 6 aa, Homo sapiens
VYVHLK

SEQ ID NO: 1192 - protein, 6 aa, Homo sapiens
WAGLEK

SEQ ID NO: 1193 - protein, 6 aa, Homo sapiens
WEDPGK

SEQ ID NO: 1194 - protein, 6 aa, Homo sapiens
WLILEK

SEQ ID NO: 1195 - protein, 6 aa, Homo sapiens
YHYLIR

SEQ ID NO: 1196 - protein, 6 aa, Homo sapiens
YNFSFR

SEQ ID NO: 1197 - protein, 6 aa, Homo sapiens
YQGGNR

SEQ ID NO: 1198 - protein, 6 aa, Homo sapiens
YVQGLK

SEQ ID NO: 1199 - protein, 6 aa, Escherichia coli
YWQAFR

SEQ ID NO: 1200 - protein, 6 aa, Homo sapiens
YYYDGK

SEQ ID NO: 1201 - protein, 6 aa, Homo sapiens
ALQEYR

SEQ ID NO: 1202 - protein, 6 aa, Homo sapiens
AQPVVK

SEQ ID NO: 1203 - protein, 6 aa, Homo sapiens
DEADFR

SEQ ID NO: 1204 - protein, 6 aa, Homo sapiens
DNTYNR

SEQ ID NO: 1205 - protein, 6 aa, Homo sapiens
DQAVLR

SEQ ID NO: 1206 - protein, 6 aa, Homo sapiens
DSWLDK

SEQ ID NO: 1207 - protein, 6 aa, Homo sapiens
EATEGK

SEQ ID NO: 1208 - protein, 6 aa, Homo sapiens
EGDDDR

SEQ ID NO: 1209 - protein, 6 aa, Homo sapiens
ELLVPR

SEQ ID NO: 1210 - protein, 6 aa, Homo sapiens
EYHTEK

SEQ ID NO: 1211 - protein, 6 aa, Homo sapiens
FTDHLK

SEQ ID NO: 1212 - protein, 6 aa, Homo sapiens
FTEDAK

SEQ ID NO: 1213 - protein, 6 aa, Homo sapiens
GTDYHK

SEQ ID NO: 1214 - protein, 6 aa, Homo sapiens
IEGSNK

SEQ ID NO: 1215 - protein, 6 aa, Homo sapiens
IVDLVK

SEQ ID NO: 1216 - protein, 6 aa, Homo sapiens
NYAEAK

SEQ ID NO: 1217 - protein, 6 aa, Homo sapiens
QPWQAK

SEQ ID NO: 1218 - protein, 6 aa, Homo sapiens
SAGLVK

SEQ ID NO: 1219 - protein, 6 aa, Homo sapiens
SEVAHR

SEQ ID NO: 1220 - protein, 6 aa, Homo sapiens
SGTNTK

SEQ ID NO: 1221 - protein, 6 aa, Homo sapiens
SSSYSK

SEQ ID NO: 1222 - protein, 6 aa, Homo sapiens
TPVSDR

SEQ ID NO: 1223 - protein, 6 aa, Homo sapiens
TTFDPK

SEQ ID NO: 1224 - protein, 6 aa, Homo sapiens
VGSQYR

SEQ ID NO: 1225 - protein, 6 aa, Homo sapiens
VPPEWK

SEQ ID NO: 1226 - protein, 6 aa, Homo sapiens
YNELLK

SEQ ID NO: 1227 - protein, 7 aa, Homo sapiens
AAIQALR

SEQ ID NO: 1228 - protein, 7 aa, Homo sapiens
AHVDALR

SEQ ID NO: 1229 - protein, 7 aa, Homo sapiens
ALVDTLK

SEQ ID NO: 1230 - protein, 7 aa, Homo sapiens
ALYAQAR

SEQ ID NO: 1231 - protein, 7 aa, Homo sapiens
AVLYNYR

SEQ ID NO: 1232 - protein, 7 aa, Homo sapiens
FDTISEK

SEQ ID NO: 1233 - protein, 7 aa, Homo sapiens
FIIPGLK

SEQ ID NO: 1234 - protein, 7 aa, Homo sapiens
FLDSNIK

SEQ ID NO: 1235 - protein, 7 aa, Homo sapiens
FTFEYSR

SEQ ID NO: 1236 - protein, 7 aa, Homo sapiens
HFQNLGK

SEQ ID NO: 1237 - protein, 7 aa, Homo sapiens
IDVHWTR

SEQ ID NO: 1238 - protein, 7 aa, Homo sapiens
IFTVNHK

SEQ ID NO: 1239 - protein, 7 aa, Homo sapiens
IWDVVEK

SEQ ID NO: 1240 - protein, 7 aa, Homo sapiens
KPYNFLK

SEQ ID NO: 1241 - protein, 7 aa, Homo sapiens
LAIPEGK

SEQ ID NO: 1242 - protein, 7 aa, Homo sapiens
SSGAFWK

SEQ ID NO: 1243 - protein, 7 aa, Homo sapiens
VFQFLEK

SEQ ID NO: 1244 - protein, 7 aa, Homo sapiens
VSSFYAK

SEQ ID NO: 1245 - protein, 7 aa, Homo sapiens
YVLSPYK

SEQ ID NO: 1246 - protein, 7 aa, Homo sapiens
GVTFLLR

SEQ ID NO: 1247 - protein, 7 aa, Homo sapiens
LVTDLTK

SEQ ID NO: 1248 - protein, 7 aa, Homo sapiens
AFSSYQK

SEQ ID NO: 1249 - protein, 7 aa, Homo sapiens
ANAGKPK

SEQ ID NO: 1250 - protein, 7 aa, Homo sapiens
DADDLQK

SEQ ID NO: 1251 - protein, 7 aa, Homo sapiens
AEEAGAR

SEQ ID NO: 1252 - protein, 7 aa, Homo sapiens
EATEAAK

SEQ ID NO: 1253 - protein, 7 aa, Homo sapiens
ENAEQSR

SEQ ID NO: 1254 - protein, 7 aa, Homo sapiens
ENGTISR

SEQ ID NO: 1255 - protein, 7 aa, Homo sapiens
EQVAEVR

SEQ ID NO: 1256 - protein, 7 aa, Homo sapiens
FFGEGTK

SEQ ID NO: 1257 - protein, 7 aa, Escherichia coli
FNDDFSR

SEQ ID NO: 1258 - protein, 7 aa, Homo sapiens
FNETTEK

SEQ ID NO: 1259 - protein, 7 aa, Homo sapiens
FSPENTR

SEQ ID NO: 1260 - protein, 7 aa, Homo sapiens
GADYSLR

SEQ ID NO: 1261 - protein, 7 aa, Homo sapiens
GALHNYK

SEQ ID NO: 1262 - protein, 7 aa, Homo sapiens
GDNNLTR

SEQ ID NO: 1263 - protein, 7 aa, Homo sapiens
GEAFTLK

SEQ ID NO: 1264 - protein, 7 aa, Homo sapiens
GEIHLGR

SEQ ID NO: 1265 - protein, 7 aa, Homo sapiens
GEQIQLK

SEQ ID NO: 1266 - protein, 7 aa, Homo sapiens
GESGDYK

SEQ ID NO: 1267 - protein, 7 aa, Homo sapiens
GEYFWEK

SEQ ID NO: 1268 - protein, 7 aa, Homo sapiens
GHVNITR

SEQ ID NO: 1269 - protein, 7 aa, Homo sapiens
GLTLHLK

SEQ ID NO: 1270 - protein, 7 aa, Homo sapiens
GNPPIYR

SEQ ID NO: 1271 - protein, 7 aa, Homo sapiens
ALDNLAR

SEQ ID NO: 1272 - protein, 7 aa, Homo sapiens
GPTQEFK

SEQ ID NO: 1273 - protein, 7 aa, Homo sapiens
GQQYQGR

SEQ ID NO: 1274 - protein, 7 aa, Homo sapiens
GTGENYR

SEQ ID NO: 1275 - protein, 7 aa, Homo sapiens
GTVYNYR

SEQ ID NO: 1276 - protein, 7 aa, Homo sapiens
GVFVLNK

SEQ ID NO: 1277 - protein, 7 aa, Homo sapiens
GVISIPR

SEQ ID NO: 1278 - protein, 7 aa, Homo sapiens
GYGFYTK

SEQ ID NO: 1279 - protein, 7 aa, Homo sapiens
HLKPLAK

SEQ ID NO: 1280 - protein, 7 aa, Homo sapiens
IAHGHYK

SEQ ID NO: 1281 - protein, 7 aa, Homo sapiens
IDTALIK

SEQ ID NO: 1282 - protein, 7 aa, Homo sapiens
IEEIAAK

SEQ ID NO: 1283 - protein, 7 aa, Homo sapiens
IIHFGTR

SEQ ID NO: 1284 - protein, 7 aa, Homo sapiens
INPLALK

SEQ ID NO: 1285 - protein, 7 aa, Homo sapiens
INSGAHK

SEQ ID NO: 1286 - protein, 7 aa, Homo sapiens
IPEATNR

SEQ ID NO: 1287 - protein, 7 aa, Homo sapiens
IRPLVTQ

SEQ ID NO: 1288 - protein, 7 aa, Homo sapiens
LAEYHAK

SEQ ID NO: 1289 - protein, 7 aa, Homo sapiens
LFLEETK

SEQ ID NO: 1290 - protein, 7 aa, Homo sapiens
LGNHPIR

SEQ ID NO: 1291 - protein, 7 aa, Homo sapiens
LGSYEHR

SEQ ID NO: 1292 - protein, 7 aa, Homo sapiens
LHELQEK

SEQ ID NO: 1293 - protein, 7 aa, Homo sapiens
LHLEGNK

SEQ ID NO: 1294 - protein, 7 aa, Homo sapiens
LNELSFK

SEQ ID NO: 1295 - protein, 7 aa, Homo sapiens
LNILNAK

SEQ ID NO: 1296 - protein, 7 aa, Homo sapiens
AVEVLPK

SEQ ID NO: 1297 - protein, 7 aa, Escherichia coli
LNVENPK

SEQ ID NO: 1298 - protein, 7 aa, Homo sapiens
LPVAPLR

SEQ ID NO: 1299 - protein, 7 aa, Homo sapiens
LQPLDFK

SEQ ID NO: 1300 - protein, 7 aa, Homo sapiens
LSNAAHK

SEQ ID NO: 1301 - protein, 7 aa, Homo sapiens
NEQVEIR

SEQ ID NO: 1302 - protein, 7 aa, Homo sapiens
NFATSNK

SEQ ID NO: 1303 - protein, 7 aa, Homo sapiens
NFGYTLR

SEQ ID NO: 1304 - protein, 7 aa, Homo sapiens
NGQVEIK

SEQ ID NO: 1305 - protein, 7 aa, Homo sapiens
NLLVALK

SEQ ID NO: 1306 - protein, 7 aa, Homo sapiens
QAEAVLK

SEQ ID NO: 1307 - protein, 7 aa, Homo sapiens
QDSQLQK

SEQ ID NO: 1308 - protein, 7 aa, Escherichia coli
QLLTPLR

SEQ ID NO: 1309 - protein, 7 aa, Homo sapiens
QSELSAK

SEQ ID NO: 1310 - protein, 7 aa, Homo sapiens
QSSEITR

SEQ ID NO: 1311 - protein, 7 aa, Homo sapiens
QVPAHAR

SEQ ID NO: 1312 - protein, 7 aa, Homo sapiens
SGQSEDR

SEQ ID NO: 1313 - protein, 7 aa, Homo sapiens
SILFLGK

SEQ ID NO: 1314 - protein, 7 aa, Homo sapiens
SIVSALK

SEQ ID NO: 1315 - protein, 7 aa, Homo sapiens
SLLQPNK

SEQ ID NO: 1316 - protein, 7 aa, Escherichia coli
SLNGEWR

SEQ ID NO: 1317 - protein, 7 aa, Homo sapiens
SQAIATK

SEQ ID NO: 1318 - protein, 7 aa, Homo sapiens
STSVFAR

SEQ ID NO: 1319 - protein, 7 aa, Homo sapiens
STVELFK

SEQ ID NO: 1320 - protein, 7 aa, Homo sapiens
SYPPDLR

SEQ ID NO: 1321 - protein, 7 aa, Homo sapiens
TILDDLR

SEQ ID NO: 1322 - protein, 7 aa, Homo sapiens
TNEFWNK

SEQ ID NO: 1323 - protein, 7 aa, Homo sapiens
TQSSDGK

SEQ ID NO: 1324 - protein, 7 aa, Homo sapiens
TQVADAK

SEQ ID NO: 1325 - protein, 7 aa, Homo sapiens
TSPVDEK

SEQ ID NO: 1326 - protein, 7 aa, Homo sapiens
VHELIER

SEQ ID NO: 1327 - protein, 7 aa, Homo sapiens
VIDQFGE

SEQ ID NO: 1328 - protein, 7 aa, Homo sapiens
VLGQVNK

SEQ ID NO: 1329 - protein, 7 aa, Homo sapiens
VQTAHFK

SEQ ID NO: 1330 - protein, 7 aa, Homo sapiens
VSQEGLK

SEQ ID NO: 1331 - protein, 7 aa, Homo sapiens
DSQEEEK

SEQ ID NO: 1332 - protein, 7 aa, Homo sapiens
VSVGGEK

SEQ ID NO: 1333 - protein, 7 aa, Homo sapiens
VVNPTEA

SEQ ID NO: 1334 - protein, 7 aa, Homo sapiens
VVPEGIR

SEQ ID NO: 1335 - protein, 7 aa, Homo sapiens
VVPEGVK

SEQ ID NO: 1336 - protein, 7 aa, Homo sapiens
WLSEEQR

SEQ ID NO: 1337 - protein, 7 aa, Homo sapiens
YDAAQLR

SEQ ID NO: 1338 - protein, 7 aa, Homo sapiens
GPLATSR

SEQ ID NO: 1339 - protein, 7 aa, Homo sapiens
LFGPDLK

SEQ ID NO: 1340 - protein, 7 aa, Homo sapiens
LPDATPK

SEQ ID NO: 1341 - protein, 7 aa, Homo sapiens
NEADELR

SEQ ID NO: 1342 - protein, 7 aa, Homo sapiens
QANTEER

SEQ ID NO: 1343 - protein, 7 aa, Homo sapiens
QNGEAVK

SEQ ID NO: 1344 - protein, 7 aa, Homo sapiens
SSTSPDR

SEQ ID NO: 1345 - protein, 7 aa, Homo sapiens
TPITVVK

SEQ ID NO: 1346 - protein, 7 aa, Homo sapiens
WHQVEVK

SEQ ID NO: 1347 - protein, 8 aa, Homo sapiens
ANSFLGEK

SEQ ID NO: 1348 - protein, 8 aa, Homo sapiens
ASSFLGEK

SEQ ID NO: 1349 - protein, 8 aa, Homo sapiens
AVRPGYPK

SEQ ID NO: 1350 - protein, 8 aa, Homo sapiens
FNALQYLR

SEQ ID NO: 1351 - protein, 8 aa, Homo sapiens
KPELVNGR

SEQ ID NO: 1352 - protein, 8 aa, Homo sapiens
LHVAGNLK

SEQ ID NO: 1353 - protein, 8 aa, Homo sapiens
LNGESNLR

SEQ ID NO: 1354 - protein, 8 aa, Homo sapiens
LSPVYAGK

SEQ ID NO: 1355 - protein, 8 aa, Homo sapiens
NGSLFAFR

SEQ ID NO: 1356 - protein, 8 aa, Homo sapiens
QINDYVAK

SEQ ID NO: 1357 - protein, 8 aa, Homo sapiens
QLELYLPK

SEQ ID NO: 1358 - protein, 8 aa, Homo sapiens
QLTPYAQR

SEQ ID NO: 1359 - protein, 8 aa, Homo sapiens
QWAGLVEK

SEQ ID NO: 1360 - protein, 8 aa, Homo sapiens
TWYPEVPK

SEQ ID NO: 1361 - protein, 8 aa, Homo sapiens
VQSTITSR

SEQ ID NO: 1362 - protein, 8 aa, Homo sapiens
VSVHPDYR

SEQ ID NO: 1363 - protein, 8 aa, Homo sapiens
EPGLQIWR

SEQ ID NO: 1364 - protein, 8 aa, Homo sapiens
GGVASGFK

SEQ ID NO: 1365 - protein, 8 aa, Homo sapiens
GQPLSPEK

SEQ ID NO: 1366 - protein, 8 aa, Homo sapiens
ILDDLSPR

SEQ ID NO: 1367 - protein, 8 aa, Homo sapiens
LEVDIDIK

SEQ ID NO: 1368 - protein, 8 aa, Homo sapiens
RPHFFFPK

SEQ ID NO: 1369 - protein, 8 aa, Homo sapiens
TLYSSSPR

SEQ ID NO: 1370 - protein, 8 aa, Homo sapiens
VATTVISK

SEQ ID NO: 1371 - protein, 8 aa, Homo sapiens
APLTKPLK

SEQ ID NO: 1372 - protein, 8 aa, Homo sapiens
AEAQVELR

SEQ ID NO: 1373 - protein, 8 aa, Homo sapiens
ALADGVQK

SEQ ID NO: 1374 - protein, 8 aa, Homo sapiens
ANSAGATR

SEQ ID NO: 1375 - protein, 8 aa, Homo sapiens
DTFVNASR

SEQ ID NO: 1376 - protein, 8 aa, Homo sapiens
EDALNETR

SEQ ID NO: 1377 - protein, 8 aa, Homo sapiens
ALSVVWDR

SEQ ID NO: 1378 - protein, 8 aa, Homo sapiens
ATLLDIYK

SEQ ID NO: 1379 - protein, 8 aa, Homo sapiens
DFVNASSK

SEQ ID NO: 1380 - protein, 8 aa, Homo sapiens
DTPFSQIK

SEQ ID NO: 1381 - protein, 8 aa, Homo sapiens
EEVFIQQR

SEQ ID NO: 1382 - protein, 8 aa, Homo sapiens
EQPGVYTK

SEQ ID NO: 1383 - protein, 8 aa, Homo sapiens
EVFEDSDK

SEQ ID NO: 1384 - protein, 8 aa, Homo sapiens
FQLVAENR

SEQ ID NO: 1385 - protein, 8 aa, Homo sapiens
GDSQSSWK

SEQ ID NO: 1386 - protein, 8 aa, Homo sapiens
GFIDGHYK

SEQ ID NO: 1387 - protein, 8 aa, Homo sapiens
GLFIIDGK

SEQ ID NO: 1388 - protein, 8 aa, Homo sapiens
GNTEGLQK

SEQ ID NO: 1389 - protein, 8 aa, Homo sapiens
GNYDAAQR

SEQ ID NO: 1390 - protein, 8 aa, Homo sapiens
GSLHANGR

SEQ ID NO: 1391 - protein, 8 aa, Homo sapiens
GVNFNVSK

SEQ ID NO: 1392 - protein, 8 aa, Homo sapiens
HDAHLNGK

SEQ ID NO: 1393 - protein, 8 aa, Homo sapiens
IDRPEASR

SEQ ID NO: 1394 - protein, 8 aa, Homo sapiens
IEGDHGAR

SEQ ID NO: 1395 - protein, 8 aa, Homo sapiens
IGEADFNR

SEQ ID NO: 1396 - protein, 8 aa, Homo sapiens
NLPNGDFR

SEQ ID NO: 1397 - protein, 8 aa, Homo sapiens
NVTAEQAR

SEQ ID NO: 1398 - protein, 8 aa, Homo sapiens
QAGAAGSR

SEQ ID NO: 1399 - protein, 8 aa, Homo sapiens
QELNGNTK

SEQ ID NO: 1400 - protein, 8 aa, Escherichia coli
QNNFNAVR

SEQ ID NO: 1401 - protein, 8 aa, Homo sapiens
SPRPSSYK

SEQ ID NO: 1402 - protein, 8 aa, Homo sapiens
SSRPSSYK

SEQ ID NO: 1403 - protein, 8 aa, Homo sapiens
TDEGIAYR

SEQ ID NO: 1404 - protein, 8 aa, Homo sapiens
TEQAAVAR

SEQ ID NO: 1405 - protein, 8 aa, Homo sapiens
TFIEDVNK

SEQ ID NO: 1406 - protein, 8 aa, Homo sapiens
TGEAVAEK

SEQ ID NO: 1407 - protein, 8 aa, Homo sapiens
TNTGLALR

SEQ ID NO: 1408 - protein, 8 aa, Homo sapiens
TPSGALHR

SEQ ID NO: 1409 - protein, 8 aa, Homo sapiens
TYSDHPEK

SEQ ID NO: 1410 - protein, 8 aa, Homo sapiens
VANEVTLN

SEQ ID NO: 1411 - protein, 8 aa, Homo sapiens
VANPLSTA

SEQ ID NO: 1412 - protein, 8 aa, Homo sapiens
VVTITLDK

SEQ ID NO: 1413 - protein, 8 aa, Homo sapiens
WETSFNHK

SEQ ID NO: 1414 - protein, 8 aa, Homo sapiens
YIILLLGK

SEQ ID NO: 1415 - protein, 8 aa, Homo sapiens
ILQADQEL

SEQ ID NO: 1416 - protein, 8 aa, Homo sapiens
NSQNPNSK

SEQ ID NO: 1417 - protein, 8 aa, Homo sapiens
SELEDNIR

SEQ ID NO: 1418 - protein, 8 aa, Homo sapiens
SETAEELK

SEQ ID NO: 1419 - protein, 8 aa, Homo sapiens
SGSGLVGR

SEQ ID NO: 1420 - protein, 8 aa, Homo sapiens
TEALTSAK

SEQ ID NO: 1421 - protein, 8 aa, Homo sapiens
TSSSFEVR

SEQ ID NO: 1422 - protein, 8 aa, Homo sapiens
VRPQQLVK

SEQ ID NO: 1423 - protein, 8 aa, Homo sapiens
VYLFLQPR

SEQ ID NO: 1424 - protein, 9 aa, Homo sapiens
AIPVTQYLK

SEQ ID NO: 1425 - protein, 9 aa, Homo sapiens
DGNTLTYYR

SEQ ID NO: 1426 - protein, 9 aa, Homo sapiens
DGTVTTDWK

SEQ ID NO: 1427 - protein, 9 aa, Homo sapiens
EDAVSAAFK

SEQ ID NO: 1428 - protein, 9 aa, Homo sapiens
EIIIHQNYK

SEQ ID NO: 1429 - protein, 9 aa, Homo sapiens
FQSVFTVTR

SEQ ID NO: 1430 - protein, 9 aa, Homo sapiens
GPGGVWAAK

SEQ ID NO: 1431 - protein, 9 aa, Homo sapiens
GYTLADNGK

SEQ ID NO: 1432 - protein, 9 aa, Homo sapiens
GYTQQLAFR

SEQ ID NO: 1433 - protein, 9 aa, Homo sapiens
ILGPLSYSK

SEQ ID NO: 1434 - protein, 9 aa, Homo sapiens
ILIGTVFHK

SEQ ID NO: 1435 - protein, 9 aa, Homo sapiens
LAVYQAGAR

SEQ ID NO: 1436 - protein, 9 aa, Homo sapiens
LPGIVAEGR

SEQ ID NO: 1437 - protein, 9 aa, Homo sapiens
LQAEAFQAR

SEQ ID NO: 1438 - protein, 9 aa, Homo sapiens
LTPYADEFK

SEQ ID NO: 1439 - protein, 9 aa, Homo sapiens
NTLIIYLDK

SEQ ID NO: 1440 - protein, 9 aa, Homo sapiens
QHIEAIDVR

SEQ ID NO: 1441 - protein, 9 aa, Homo sapiens
QSSSYSFFK

SEQ ID NO: 1442 - protein, 9 aa, Homo sapiens
SVGFHLPSR

SEQ ID NO: 1443 - protein, 9 aa, Homo sapiens
VAWHYDEEK

SEQ ID NO: 1444 - protein, 9 aa, Homo sapiens
VNSFFSTFK

SEQ ID NO: 1445 - protein, 9 aa, Homo sapiens
VQGVEFSHR

SEQ ID NO: 1446 - protein, 9 aa, Homo sapiens
VSTAFVYTK

SEQ ID NO: 1447 - protein, 9 aa, Homo sapiens
YGFYTHVFR

SEQ ID NO: 1448 - protein, 9 aa, Homo sapiens
YTLFQIFSK

SEQ ID NO: 1449 - protein, 9 aa, Homo sapiens
LDVDQALNR

SEQ ID NO: 1450 - protein, 9 aa, Homo sapiens
QTALVELVK

SEQ ID NO: 1451 - protein, 9 aa, Homo sapiens
QVSGPLTSK

SEQ ID NO: 1452 - protein, 9 aa, Homo sapiens
SLHTLFGDK

SEQ ID NO: 1453 - protein, 9 aa, Homo sapiens
VASYGVKPR

SEQ ID NO: 1454 - protein, 9 aa, Homo sapiens
EQQDSPGNK

SEQ ID NO: 1455 - protein, 9 aa, Homo sapiens
ANTFLEEVR

SEQ ID NO: 1456 - protein, 9 aa, Homo sapiens
AVSPLPYLR

SEQ ID NO: 1457 - protein, 9 aa, Homo sapiens
EAPDLVLQR

SEQ ID NO: 1458 - protein, 9 aa, Homo sapiens
EEQYNSTFR

SEQ ID NO: 1459 - protein, 9 aa, Homo sapiens
EQANNILAR

SEQ ID NO: 1460 - protein, 9 aa, Homo sapiens
EYAPGETVK

SEQ ID NO: 1461 - protein, 9 aa, Homo sapiens
GAYQNNEIK

SEQ ID NO: 1462 - protein, 9 aa, Homo sapiens
GWVDLFVPK

SEQ ID NO: 1463 - protein, 9 aa, Homo sapiens
HHGPTITAK

SEQ ID NO: 1464 - protein, 9 aa, Homo sapiens
HLSISVVLK

SEQ ID NO: 1465 - protein, 9 aa, Escherichia coli
HQQQFFQFR

SEQ ID NO: 1466 - protein, 9 aa, Homo sapiens
INDILEHVK

SEQ ID NO: 1467 - protein, 9 aa, Homo sapiens
LLIGTVFHK

SEQ ID NO: 1468 - protein, 9 aa, Homo sapiens
LQDEDLGFL

SEQ ID NO: 1469 - protein, 9 aa, Homo sapiens
LVELAHQYK

SEQ ID NO: 1470 - protein, 9 aa, Homo sapiens
NHQSSYQTR

SEQ ID NO: 1471 - protein, 9 aa, Homo sapiens
SLDEHYHIR

SEQ ID NO: 1472 - protein, 9 aa, Escherichia coli
TDRPSQQLR

SEQ ID NO: 1473 - protein, 9 aa, Homo sapiens
VEDFGNAWK

SEQ ID NO: 1474 - protein, 9 aa, Homo sapiens
VNDESTEGK

SEQ ID NO: 1475 - protein, 9 aa, Homo sapiens
YPPGTSLSR

SEQ ID NO: 1476 - protein, 9 aa, Homo sapiens
IGKPAPDFK

SEQ ID NO: 1477 - protein, 9 aa, Homo sapiens
NNSDISSTR

SEQ ID NO: 1478 - protein, 9 aa, Homo sapiens
VAIVVGAPR

SEQ ID NO: 1479 - protein, 10 aa, Homo sapiens
ATAVVDGAFK

SEQ ID NO: 1480 - protein, 10 aa, Homo sapiens
ESDTSYVSLK

SEQ ID NO: 1481 - protein, 10 aa, Homo sapiens
FKPTLSQQQK

SEQ ID NO: 1482 - protein, 10 aa, Homo sapiens
FQPTLLTLPR

SEQ ID NO: 1483 - protein, 10 aa, Homo sapiens
AGEVQEPELR

SEQ ID NO: 1484 - protein, 10 aa, Homo sapiens
ANRPFLVFIR

SEQ ID NO: 1485 - protein, 10 aa, Homo sapiens
DEPTYILNIK

SEQ ID NO: 1486 - protein, 10 aa, Homo sapiens
EDQYHYLLDR

SEQ ID NO: 1487 - protein, 10 aa, Homo sapiens
GTFSTTVTGR

SEQ ID NO: 1488 - protein, 10 aa, Homo sapiens
GTYSTTVTGR

SEQ ID NO: 1489 - protein, 10 aa, Homo sapiens
HDNWDLTQLK

SEQ ID NO: 1490 - protein, 10 aa, Homo sapiens
HSTFIPGTNK

SEQ ID NO: 1491 - protein, 10 aa, Homo sapiens
IEIPLPFGGK

SEQ ID NO: 1492 - protein, 10 aa, Homo sapiens
IQHTVTASVR

SEQ ID NO: 1493 - protein, 10 aa, Homo sapiens
IQNVLSEKPR

SEQ ID NO: 1494 - protein, 10 aa, Homo sapiens
ISNIPDEYFK

SEQ ID NO: 1495 - protein, 10 aa, Homo sapiens
IYHSHIDAPK

SEQ ID NO: 1496 - protein, 10 aa, Homo sapiens
IYSLWEHSTK

SEQ ID NO: 1497 - protein, 10 aa, Homo sapiens
LATALSLSNK

SEQ ID NO: 1498 - protein, 10 aa, Homo sapiens
LDFSSQADLR

SEQ ID NO: 1499 - protein, 10 aa, Homo sapiens
LPGLHNSLVK

SEQ ID NO: 1500 - protein, 10 aa, Homo sapiens
LSEAEFEVLK

SEQ ID NO: 1501 - protein, 10 aa, Homo sapiens
LSRPAVITDK

SEQ ID NO: 1502 - protein, 10 aa, Homo sapiens
NADYSYSVWK

SEQ ID NO: 1503 - protein, 10 aa, Homo sapiens
NALALFVLPK

SEQ ID NO: 1504 - protein, 10 aa, Homo sapiens
NVHSGSTFFK

SEQ ID NO: 1505 - protein, 10 aa, Homo sapiens
QGHNSVFLIK

SEQ ID NO: 1506 - protein, 10 aa, Homo sapiens
QTVSWAVTPK

SEQ ID NO: 1507 - protein, 10 aa, Homo sapiens
TGISPLALIK

SEQ ID NO: 1508 - protein, 10 aa, Homo sapiens
VLVDHFGYTK

SEQ ID NO: 1509 - protein, 10 aa, Homo sapiens
YEGLQEWEGK

SEQ ID NO: 1510 - protein, 10 aa, Homo sapiens
QFTSSTSYNR

SEQ ID NO: 1511 - protein, 10 aa, Homo sapiens
VTSGSTTTTR

SEQ ID NO: 1512 - protein, 10 aa, Homo sapiens
ALSNVEGFER

SEQ ID NO: 1513 - protein, 10 aa, Homo sapiens
AGGSIPIPQK

SEQ ID NO: 1514 - protein, 10 aa, Homo sapiens
ATEDEGSEQK

SEQ ID NO: 1515 - protein, 10 aa, Homo sapiens
DGYDGLPGPK

SEQ ID NO: 1516 - protein, 10 aa, Homo sapiens
DIENFNSTQK

SEQ ID NO: 1517 - protein, 10 aa, Homo sapiens
DNEDFQESNR

SEQ ID NO: 1518 - protein, 10 aa, Escherichia coli
ELNYGPHQWR

SEQ ID NO: 1519 - protein, 10 aa, Homo sapiens
GSTSHHLVSR

SEQ ID NO: 1520 - protein, 10 aa, Homo sapiens
GTSSTTTTGK

SEQ ID NO: 1521 - protein, 10 aa, Homo sapiens
HANWTLTPLK

SEQ ID NO: 1522 - protein, 10 aa, Homo sapiens
IHIFNERPGK

SEQ ID NO: 1523 - protein, 10 aa, Homo sapiens
LAPGELTIIL

SEQ ID NO: 1524 - protein, 10 aa, Homo sapiens
LVGFIDDAVK

SEQ ID NO: 1525 - protein, 10 aa, Homo sapiens
NFTENDLLVR

SEQ ID NO: 1526 - protein, 10 aa, Homo sapiens
NNQIDHIDEK

SEQ ID NO: 1527 - protein, 10 aa, Homo sapiens
TGAVSGHSLK

SEQ ID NO: 1528 - protein, 10 aa, Escherichia coli
TPHPALTEAK

SEQ ID NO: 1529 - protein, 10 aa, Homo sapiens
WSSTSPHRPR

SEQ ID NO: 1530 - protein, 10 aa, Homo sapiens
WTYVLFYSPR

SEQ ID NO: 1531 - protein, 10 aa, Homo sapiens
QDGVVVTINK

SEQ ID NO: 1532 - protein, 10 aa, Homo sapiens
VQGNDHSATR

SEQ ID NO: 1533 - protein, 11 aa, Homo sapiens
HLSLLTTLSNR

SEQ ID NO: 1534 - protein, 11 aa, Homo sapiens
HVVPNEVVVQR

SEQ ID NO: 1535 - protein, 11 aa, Homo sapiens
AGHIAWTSSGK

SEQ ID NO: 1536 - protein, 11 aa, Homo sapiens
AQWANPFDPSK

SEQ ID NO: 1537 - protein, 11 aa, Homo sapiens
ATGVLYDYVNK

SEQ ID NO: 1538 - protein, 11 aa, Homo sapiens
EFQLFSSPHGK

SEQ ID NO: 1539 - protein, 11 aa, Homo sapiens
EQHLFLPFSYK

SEQ ID NO: 1540 - protein, 11 aa, Homo sapiens
FYNQVSTPLLR

SEQ ID NO: 1541 - protein, 11 aa, Homo sapiens
HIVTFDGQNFK

SEQ ID NO: 1542 - protein, 11 aa, Homo sapiens
IPKPEASFSPR

SEQ ID NO: 1543 - protein, 11 aa, Homo sapiens
ITHYNYLILSK

SEQ ID NO: 1544 - protein, 11 aa, Homo sapiens
LPPNVVEESAR

SEQ ID NO: 1545 - protein, 11 aa, Homo sapiens
LVPFATELHER

SEQ ID NO: 1546 - protein, 11 aa, Homo sapiens
QDNEILIFWSK

SEQ ID NO: 1547 - protein, 11 aa, Homo sapiens
QPSSAFAAFVK

SEQ ID NO: 1548 - protein, 11 aa, Homo sapiens
SIEVFGQFNGK

SEQ ID NO: 1549 - protein, 11 aa, Homo sapiens
TEDSSSFLIDK

SEQ ID NO: 1550 - protein, 11 aa, Homo sapiens
TSDQIHFFFAK

SEQ ID NO: 1551 - protein, 11 aa, Homo sapiens
VQFELHYQEVK

SEQ ID NO: 1552 - protein, 11 aa, Homo sapiens
YHWEHTGLTLR

SEQ ID NO: 1553 - protein, 11 aa, Homo sapiens
LVAASQAALGL

SEQ ID NO: 1554 - protein, 11 aa, Homo sapiens
YGLVTYATYPK

SEQ ID NO: 1555 - protein, 11 aa, Homo sapiens
EGGQTAPASTR

SEQ ID NO: 1556 - protein, 11 aa, Homo sapiens
EQNSLDSWGPK

SEQ ID NO: 1557 - protein, 11 aa, Homo sapiens
IYVENDFSWDK

SEQ ID NO: 1558 - protein, 11 aa, Homo sapiens
DFSAEYEEDGK

SEQ ID NO: 1559 - protein, 11 aa, Homo sapiens
GDPGIPGNPGK

SEQ ID NO: 1560 - protein, 11 aa, Homo sapiens
GEAQVWTQLLR

SEQ ID NO: 1561 - protein, 11 aa, Homo sapiens
GEPGLPGHPGK

SEQ ID NO: 1562 - protein, 11 aa, Escherichia coli
LAAHPPFASWR

SEQ ID NO: 1563 - protein, 11 aa, Homo sapiens
LGFYFQSEDIK

SEQ ID NO: 1564 - protein, 11 aa, Homo sapiens
LLLLLLLLPLR

SEQ ID NO: 1565 - protein, 11 aa, Homo sapiens
SPGGIQPHVSR

SEQ ID NO: 1566 - protein, 11 aa, Homo sapiens
SSQESYAHGTK

SEQ ID NO: 1567 - protein, 11 aa, Homo sapiens
LSGEAYGFVAR

SEQ ID NO: 1568 - protein, 11 aa, Homo sapiens
LSLNAELQLDR

SEQ ID NO: 1569 - protein, 11 aa, Homo sapiens
NVGSQTLQTFK

SEQ ID NO: 1570 - protein, 11 aa, Homo sapiens
VTIGLLFWDGR

SEQ ID NO: 1571 - protein, 12 aa, Homo sapiens
GLYLETEAGYYK

SEQ ID NO: 1572 - protein, 12 aa, Homo sapiens
AAAATGTIFTFR

SEQ ID NO: 1573 - protein, 12 aa, Homo sapiens
AIEDYINEFSVR

SEQ ID NO: 1574 - protein, 12 aa, Homo sapiens
APSTWLTAYVVK

SEQ ID NO: 1575 - protein, 12 aa, Homo sapiens
EDTPNSVWEPAK

SEQ ID NO: 1576 - protein, 12 aa, Homo sapiens
EVVADSVWVDVK

SEQ ID NO: 1577 - protein, 12 aa, Homo sapiens
FLASVSTVLTSK

SEQ ID NO: 1578 - protein, 12 aa, Homo sapiens
FQFPGKPGIYTR

SEQ ID NO: 1579 - protein, 12 aa, Homo sapiens
FQNSAILTIQPK

SEQ ID NO: 1580 - protein, 12 aa, Homo sapiens
GSSTWLTAFVLK

SEQ ID NO: 1581 - protein, 12 aa, Homo sapiens
IPLYYPNAGLTR

SEQ ID NO: 1582 - protein, 12 aa, Homo sapiens
LPYTIITTPPLK

SEQ ID NO: 1583 - protein, 12 aa, Homo sapiens
NPNGYSFSIPVK

SEQ ID NO: 1584 - protein, 12 aa, Homo sapiens
SGLSTGWTQLSK

SEQ ID NO: 1585 - protein, 12 aa, Homo sapiens
TIYTPGSTVLYR

SEQ ID NO: 1586 - protein, 12 aa, Homo sapiens
TPAYYPNAGLIK

SEQ ID NO: 1587 - protein, 12 aa, Homo sapiens
TPENYPNAGLTR

SEQ ID NO: 1588 - protein, 12 aa, Homo sapiens
TTEYYPNGGLTR

SEQ ID NO: 1589 - protein, 12 aa, Homo sapiens
VYSLNDDLKPAK

SEQ ID NO: 1590 - protein, 12 aa, Homo sapiens
WILTAAHTLYPK

SEQ ID NO: 1591 - protein, 12 aa, Homo sapiens
SPGQHDGTYFGR

SEQ ID NO: 1592 - protein, 12 aa, Homo sapiens
VTFQLTYEEVLK

SEQ ID NO: 1593 - protein, 12 aa, Homo sapiens
YPVAHFIDQTLK

SEQ ID NO: 1594 - protein, 12 aa, Homo sapiens
DSSTWLTAFVLK

SEQ ID NO: 1595 - protein, 12 aa, Homo sapiens
AFIQLWAFDAVK

SEQ ID NO: 1596 - protein, 12 aa, Homo sapiens
AQALEISGGFDK

SEQ ID NO: 1597 - protein, 12 aa, Homo sapiens
DETHFEVVESGR

SEQ ID NO: 1598 - protein, 12 aa, Escherichia coli
DWENPGVTQLNR

SEQ ID NO: 1599 - protein, 12 aa, Homo sapiens
DYFVPQLYSFLK

SEQ ID NO: 1600 - protein, 12 aa, Homo sapiens
EVGTVLSQVYSK

SEQ ID NO: 1601 - protein, 12 aa, Homo sapiens
GEPGIPAIPGIR

SEQ ID NO: 1602 - protein, 12 aa, Homo sapiens
GGPGAPGAPGPK

SEQ ID NO: 1603 - protein, 12 aa, Escherichia coli
LPSEFDLSAFLR

SEQ ID NO: 1604 - protein, 12 aa, Homo sapiens
NTFTLSYDGSLR

SEQ ID NO: 1605 - protein, 12 aa, Homo sapiens
QIFLPEPEQPSR

SEQ ID NO: 1606 - protein, 12 aa, Homo sapiens
SFSIIGDFQNGK

SEQ ID NO: 1607 - protein, 13 aa, Homo sapiens
AEAQAQYSAAVAK

SEQ ID NO: 1608 - protein, 13 aa, Homo sapiens
EDFTSLSLVLYSR

SEQ ID NO: 1609 - protein, 13 aa, Homo sapiens
NGIDIYSLTVDSR

SEQ ID NO: 1610 - protein, 13 aa, Homo sapiens
NRPPLEEDDEEGE

SEQ ID NO: 1611 - protein, 13 aa, Homo sapiens
AAVYHHFISDGVR

SEQ ID NO: 1612 - protein, 13 aa, Homo sapiens
DNSVHWERPQKPK

SEQ ID NO: 1613 - protein, 13 aa, Homo sapiens
ELSYYSLEDLNNK

SEQ ID NO: 1614 - protein, 13 aa, Homo sapiens
FATTFYQHLADSK

SEQ ID NO: 1615 - protein, 13 aa, Homo sapiens
HIQNIDIQHLAGK

SEQ ID NO: 1616 - protein, 13 aa, Homo sapiens
IYSGILNLSDITK

SEQ ID NO: 1617 - protein, 13 aa, Homo sapiens
QTHQPPAPNSLIR

SEQ ID NO: 1618 - protein, 13 aa, Homo sapiens
RPWNVASLIYETK

SEQ ID NO: 1619 - protein, 13 aa, Homo sapiens
SSLSVPYVIVPLK

SEQ ID NO: 1620 - protein, 13 aa, Homo sapiens
TATSEYQTFFNPR

SEQ ID NO: 1621 - protein, 13 aa, Homo sapiens
TLYLADTFPTNFR

SEQ ID NO: 1622 - protein, 13 aa, Homo sapiens
WNFYYSPQSSPDK

SEQ ID NO: 1623 - protein, 13 aa, Homo sapiens
TEGDGVYTLNNEK

SEQ ID NO: 1624 - protein, 13 aa, Homo sapiens
WWTQAQAHDLVIK

SEQ ID NO: 1625 - protein, 13 aa, Homo sapiens
FGSAIAPLGDLDR

SEQ ID NO: 1626 - protein, 13 aa, Homo sapiens
LWAYLTIQELLAK

SEQ ID NO: 1627 - protein, 13 aa, Homo sapiens
LLDLVFLLDGSSR

SEQ ID NO: 1628 - protein, 13 aa, Homo sapiens
LPPGLLANFTLLR

SEQ ID NO: 1629 - protein, 13 aa, Homo sapiens
NETYQLFLSYSSK

SEQ ID NO: 1630 - protein, 13 aa, Homo sapiens
SHAPEVITSSPLK

SEQ ID NO: 1631 - protein, 13 aa, Homo sapiens
VENDPHFIIYLPK

SEQ ID NO: 1632 - protein, 13 aa, Homo sapiens
VVHFIYIAILSQK

SEQ ID NO: 1633 - protein, 13 aa, Homo sapiens
QAEISASAPTSLR

SEQ ID NO: 1634 - protein, 14 aa, Homo sapiens
IDGSGNFQVLLSDR

SEQ ID NO: 1635 - protein, 14 aa, Homo sapiens
ITPNLAEFAFSLYR

SEQ ID NO: 1636 - protein, 14 aa, Homo sapiens
AFVLSSVDELEQQR

SEQ ID NO: 1637 - protein, 14 aa, Homo sapiens
EDPQTFYYAVAVVK

SEQ ID NO: 1638 - protein, 14 aa, Homo sapiens
GETHEQVHSILHFK

SEQ ID NO: 1639 - protein, 14 aa, Homo sapiens
GGSASTWLTAFALR

SEQ ID NO: 1640 - protein, 14 aa, Homo sapiens
IAQWQSFQLEGGLK

SEQ ID NO: 1641 - protein, 14 aa, Homo sapiens
IAYGTQGSSGYSLR

SEQ ID NO: 1642 - protein, 14 aa, Homo sapiens
IEFEWNTGTNVDTK

SEQ ID NO: 1643 - protein, 14 aa, Homo sapiens
LALWGEHTGQLYSK

SEQ ID NO: 1644 - protein, 14 aa, Homo sapiens
LVAYYTLIGASGQR

SEQ ID NO: 1645 - protein, 14 aa, Homo sapiens
SELTQQLNALFQDK

SEQ ID NO: 1646 - protein, 14 aa, Homo sapiens
TAQEGDHGSHVYTK

SEQ ID NO: 1647 - protein, 14 aa, Homo sapiens
TEVSSNHVLIYLDK

SEQ ID NO: 1648 - protein, 14 aa, Homo sapiens
VEQAVETEPEPELR

SEQ ID NO: 1649 - protein, 14 aa, Homo sapiens
VPGLYYFTYHASSR

SEQ ID NO: 1650 - protein, 14 aa, Homo sapiens
YAGSQVASTSEVLK

SEQ ID NO: 1651 - protein, 14 aa, Homo sapiens
YLSDHSFLVSQGDR

SEQ ID NO: 1652 - protein, 14 aa, Homo sapiens
VPQVSTPTLVEVSR

SEQ ID NO: 1653 - protein, 14 aa, Homo sapiens
GQVLVFLGQSEGLR

SEQ ID NO: 1654 - protein, 14 aa, Homo sapiens
LANLTQGEDQYYLR

SEQ ID NO: 1655 - protein, 14 aa, Homo sapiens
DFHINLFQVLPWLK

SEQ ID NO: 1656 - protein, 14 aa, Homo sapiens
DSWEDIFELLFWGR

SEQ ID NO: 1657 - protein, 14 aa, Homo sapiens
EDFSTTGTAYFEVK

SEQ ID NO: 1658 - protein, 14 aa, Homo sapiens
EEYFDPSIVGWTVK

SEQ ID NO: 1659 - protein, 14 aa, Homo sapiens
ELELQIGNALFIGK

SEQ ID NO: 1660 - protein, 14 aa, Homo sapiens
ELFNPHGISIFIDK

SEQ ID NO: 1661 - protein, 14 aa, Homo sapiens
GGSSGWSGGLAQNR

SEQ ID NO: 1662 - protein, 14 aa, Homo sapiens
HPYFYAPELLFFAK

SEQ ID NO: 1663 - protein, 14 aa, Homo sapiens
ISEGLPALEFPNEK

SEQ ID NO: 1664 - protein, 14 aa, Homo sapiens
LWAYLTINQLLAER

SEQ ID NO: 1665 - protein, 14 aa, Homo sapiens
SFDYHQFVDETNDK

SEQ ID NO: 1666 - protein, 14 aa, Homo sapiens
TPPQSQTPGALPAK

SEQ ID NO: 1667 - protein, 14 aa, Homo sapiens
TWGQEQTYVISAPK

SEQ ID NO: 1668 - protein, 14 aa, Homo sapiens
VEDPESTLFGSVIR

SEQ ID NO: 1669 - protein, 14 aa, Homo sapiens
VVTEADVYITFGIR

SEQ ID NO: 1670 - protein, 15 aa, Homo sapiens
ANLQSVPHASASRPR

SEQ ID NO: 1671 - protein, 15 aa, Homo sapiens
EVQGFESATFLGYFK

SEQ ID NO: 1672 - protein, 15 aa, Homo sapiens
AAQVTIQSSGTFSSK

SEQ ID NO: 1673 - protein, 15 aa, Homo sapiens
ALLAYAFALAGNQDK

SEQ ID NO: 1674 - protein, 15 aa, Homo sapiens
ALLVGEHLNIIVTPK

SEQ ID NO: 1675 - protein, 15 aa, Homo sapiens
ALYWVNGQVPDGVSK

SEQ ID NO: 1676 - protein, 15 aa, Homo sapiens
ATLYALSHAVNNYHK

SEQ ID NO: 1677 - protein, 15 aa, Homo sapiens
DASGVTFTWTPSSGK

SEQ ID NO: 1678 - protein, 15 aa, Homo sapiens
DVWGIEGPIDAAFTR

SEQ ID NO: 1679 - protein, 15 aa, Homo sapiens
ETAVDGELVVLYDVK

SEQ ID NO: 1680 - protein, 15 aa, Homo sapiens
FNSSYLQGTNQITGR

SEQ ID NO: 1681 - protein, 15 aa, Homo sapiens
FSISATYDLGATLLK

SEQ ID NO: 1682 - protein, 15 aa, Homo sapiens
FSYSSGHVHLSSENK

SEQ ID NO: 1683 - protein, 15 aa, Homo sapiens
FTVDRPFLFLIYEHR

SEQ ID NO: 1684 - protein, 15 aa, Homo sapiens
GDSGGAFAVQDPNDK

SEQ ID NO: 1685 - protein, 15 aa, Homo sapiens
HFWQQDEPPQSPWDR

SEQ ID NO: 1686 - protein, 15 aa, Homo sapiens
HIYAISSAALSASYK

SEQ ID NO: 1687 - protein, 15 aa, Homo sapiens
HLEVDVWVIEPQGLR

SEQ ID NO: 1688 - protein, 15 aa, Homo sapiens
IEGNLIFDPNNYLPK

SEQ ID NO: 1689 - protein, 15 aa, Homo sapiens
IQPSGGTNINEALLR

SEQ ID NO: 1690 - protein, 15 aa, Homo sapiens
NLQNNAEWVYQGAIR

SEQ ID NO: 1691 - protein, 15 aa, Homo sapiens
SGSSTASWIQNVDTK

SEQ ID NO: 1692 - protein, 15 aa, Homo sapiens
TSSFALNLPTLPEVK

SEQ ID NO: 1693 - protein, 15 aa, Homo sapiens
VIVIPVGIGPHANLK

SEQ ID NO: 1694 - protein, 15 aa, Homo sapiens
YEVQGEVFTKPQLWP

SEQ ID NO: 1695 - protein, 15 aa, Homo sapiens
AVVLTLALVAVAGAR

SEQ ID NO: 1696 - protein, 15 aa, Homo sapiens
ENSLYLTAFTVIGIR

SEQ ID NO: 1697 - protein, 15 aa, Homo sapiens
FVEGSHNSTVSLTTK

SEQ ID NO: 1698 - protein, 15 aa, Homo sapiens
GLPGLAGDHGEFGEK

SEQ ID NO: 1699 - protein, 15 aa, Homo sapiens
HFVINLIGDFEVAEK

SEQ ID NO: 1700 - protein, 15 aa, Escherichia coli
LSGQTIEVTSEYLFR

SEQ ID NO: 1701 - protein, 15 aa, Homo sapiens
LTLLTLLLLLLAGDR

SEQ ID NO: 1702 - protein, 15 aa, Homo sapiens
SEFPESWLWNVEDLK

SEQ ID NO: 1703 - protein, 15 aa, Homo sapiens
VEDLHVGATVAPSSR

SEQ ID NO: 1704 - protein, 15 aa, Homo sapiens
VLLVVALLALLASAR

SEQ ID NO: 1705 - protein, 15 aa, Escherichia coli
VNWLGLGPQENYPDR

SEQ ID NO: 1706 - protein, 16 aa, Homo sapiens
EPQDTYHYLPFSLPHR

SEQ ID NO: 1707 - protein, 16 aa, Homo sapiens
ALVEGVDQLFTDYQIK

SEQ ID NO: 1708 - protein, 16 aa, Homo sapiens
DAVEKPQEFTIVAFVK

SEQ ID NO: 1709 - protein, 16 aa, Homo sapiens
DTVIKPLLVEPEGLEK

SEQ ID NO: 1710 - protein, 16 aa, Homo sapiens
EGGPSQIGDALGFAVR

SEQ ID NO: 1711 - protein, 16 aa, Homo sapiens
EHEGAIYPDNTTDFQR

SEQ ID NO: 1712 - protein, 16 aa, Homo sapiens
ENQLEVLEVSWLHGLK

SEQ ID NO: 1713 - protein, 16 aa, Homo sapiens
EQLGPVTQEFWDNLEK

SEQ ID NO: 1714 - protein, 16 aa, Homo sapiens
GTQEQDFYVTSETVVR

SEQ ID NO: 1715 - protein, 16 aa, Homo sapiens
TWDPEGVIFYGDTNPK

SEQ ID NO: 1716 - protein, 16 aa, Homo sapiens
NLTDFAEQYSIQDWAK

SEQ ID NO: 1717 - protein, 16 aa, Homo sapiens
NNEGTYYSPNYNPQSR

SEQ ID NO: 1718 - protein, 16 aa, Homo sapiens
SGIPIVTSPYQIHFTK

SEQ ID NO: 1719 - protein, 16 aa, Homo sapiens
VNQNLVYESGSLNFSK

SEQ ID NO: 1720 - protein, 16 aa, Homo sapiens
YTGNASALFILPDQDK

SEQ ID NO: 1721 - protein, 16 aa, Homo sapiens
YLGNATAIFFLPDEGK

SEQ ID NO: 1722 - protein, 16 aa, Homo sapiens
ASVQLLVQDSLNPAVK

SEQ ID NO: 1723 - protein, 16 aa, Escherichia coli
IENGLLLLNGKPLLIR

SEQ ID NO: 1724 - protein, 16 aa, Homo sapiens
LLNYNPEDPPGSEVLR

SEQ ID NO: 1725 - protein, 16 aa, Escherichia coli
LQGGFVWDWVDQSLIK

SEQ ID NO: 1726 - protein, 16 aa, Homo sapiens
SYFPESWLWEVHLVPR

SEQ ID NO: 1727 - protein, 16 aa, Homo sapiens
YIYPLDSLTWIEYWPR

SEQ ID NO: 1728 - protein, 16 aa, Homo sapiens
VLVLLLAVAFGHALER

SEQ ID NO: 1729 - protein, 17 aa, Homo sapiens
NPLVWVHASPEHVVVTR

SEQ ID NO: 1730 - protein, 17 aa, Homo sapiens
QTQVSVLPEGGETPLFK

SEQ ID NO: 1731 - protein, 17 aa, Homo sapiens
VFDEFKPLVEEPQNLIK

SEQ ID NO: 1732 - protein, 17 aa, Homo sapiens
AHTSFQISLSVSYTGSR

SEQ ID NO: 1733 - protein, 17 aa, Homo sapiens
ELHHLQEQNVSNAFLDK

SEQ ID NO: 1734 - protein, 17 aa, Homo sapiens
EYSGTIASEANTYLNSK

SEQ ID NO: 1735 - protein, 17 aa, Homo sapiens
LSINTHPSQKPLSITVR

SEQ ID NO: 1736 - protein, 17 aa, Homo sapiens
LSLESLTSYFSIESSTK

SEQ ID NO: 1737 - protein, 17 aa, Homo sapiens
NKPGVYTDVAYYLAWIR

SEQ ID NO: 1738 - protein, 17 aa, Homo sapiens
NNSPYEIENGVVWVSFR

SEQ ID NO: 1739 - protein, 17 aa, Homo sapiens
QDPPSVVVTSHQAPGEK

SEQ ID NO: 1740 - protein, 17 aa, Homo sapiens
QEPSQGTTTFAVTSILR

SEQ ID NO: 1741 - protein, 17 aa, Homo sapiens
TYYIAAVEVEWDYSPQR

SEQ ID NO: 1742 - protein, 17 aa, Homo sapiens
VEGTAFVIFGIQDGEQR

SEQ ID NO: 1743 - protein, 17 aa, Homo sapiens
GNSFPASLVVAAEEGER

SEQ ID NO: 1744 - protein, 17 aa, Homo sapiens
AAVLTLAVLFLTGSQAR

SEQ ID NO: 1745 - protein, 17 aa, Homo sapiens
EGGLGPLNIPLLADVTR

SEQ ID NO: 1746 - protein, 17 aa, Homo sapiens
FEVDSPVYNATWSASLK

SEQ ID NO: 1747 - protein, 17 aa, Homo sapiens
HPVNVDFLGIYIPPTNK

SEQ ID NO: 1748 - protein, 17 aa, Homo sapiens
LHINHNNLTESVGPLPK

SEQ ID NO: 1749 - protein, 17 aa, Homo sapiens
QPFVQGLALYTPVVLPR

SEQ ID NO: 1750 - protein, 17 aa, Homo sapiens
SVNDIVVLGPEQFYATR

SEQ ID NO: 1751 - protein, 17 aa, Homo sapiens
TTIEKPVWLGFLGPIIK

SEQ ID NO: 1752 - protein, 17 aa, Homo sapiens
VAVVEYHDGSHAYIGLK

SEQ ID NO: 1753 - protein, 17 aa, Homo sapiens
VGEVLNSIFFELEADER

SEQ ID NO: 1754 - protein, 17 aa, Homo sapiens
VTGVDTDPHFIIHVPQK

SEQ ID NO: 1755 - protein, 17 aa, Homo sapiens
WFLLEQPEIQVAHFPFK

SEQ ID NO: 1756 - protein, 17 aa, Homo sapiens
WVTFISLLFLFSSAYSR

SEQ ID NO: 1757 - protein, 18 aa, Homo sapiens
NLVVSVDDGGTFEVVLHR

SEQ ID NO: 1758 - protein, 18 aa, Homo sapiens
QLTSGPNQEQVSPLTLLK

SEQ ID NO: 1759 - protein, 18 aa, Homo sapiens
TPSAAYLWVGTGASEAEK

SEQ ID NO: 1760 - protein, 18 aa, Homo sapiens
AYYENSPQQVFSTEFEVK

SEQ ID NO: 1761 - protein, 18 aa, Homo sapiens
DLEIEVVLFHPNYNINGK

SEQ ID NO: 1762 - protein, 18 aa, Homo sapiens
FAHYVVTSQVVNTANEAR

SEQ ID NO: 1763 - protein, 18 aa, Homo sapiens
GGETAQSADPQWEQLNNK

SEQ ID NO: 1764 - protein, 18 aa, Homo sapiens
LEVLNFDFQANAQLSNPK

SEQ ID NO: 1765 - protein, 18 aa, Homo sapiens
LHEAFSPVSYQHDLALLR

SEQ ID NO: 1766 - protein, 18 aa, Homo sapiens
LLIYAVLPTGDVIGDSAK

SEQ ID NO: 1767 - protein, 18 aa, Homo sapiens
NLASRPYTFHSHGITYYK

SEQ ID NO: 1768 - protein, 18 aa, Homo sapiens
TLDEFTIIQNLQPQYQFR

SEQ ID NO: 1769 - protein, 18 aa, Homo sapiens
TQFNNNEYSQDLDAYNTK

SEQ ID NO: 1770 - protein, 18 aa, Homo sapiens
VELEDWAGNEAYAEYHFR

SEQ ID NO: 1771 - protein, 18 aa, Homo sapiens
DGYNDIAVAAPYGGPSGR

SEQ ID NO: 1772 - protein, 18 aa, Homo sapiens
GSSVHQDFLGFYVLDSHR

SEQ ID NO: 1773 - protein, 18 aa, Homo sapiens
AVNITSENLIDDVVSLIR

SEQ ID NO: 1774 - protein, 18 aa, Homo sapiens
DIVEYYNDSNGSHVLQGR

SEQ ID NO: 1775 - protein, 18 aa, Homo sapiens
DQEVLLQTFLDDASPGDK

SEQ ID NO: 1776 - protein, 18 aa, Homo sapiens
FSVPAGIVIPSFQALTAR

SEQ ID NO: 1777 - protein, 18 aa, Homo sapiens
IGWPNAPILIQDFETLPR

SEQ ID NO: 1778 - protein, 18 aa, Homo sapiens
IYPGVDFGGEELNVTFVK

SEQ ID NO: 1779 - protein, 18 aa, Homo sapiens
LPSGLPVSLLTLYLDNNK

SEQ ID NO: 1780 - protein, 18 aa, Homo sapiens
NLQDLLQFIFQLIEDNIK

SEQ ID NO: 1781 - protein, 18 aa, Homo sapiens
VLVLLSLLAIHQTTTAEK

SEQ ID NO: 1782 - protein, 19 aa, Homo sapiens
DIPQPHAEPWAFSLDLGLK

SEQ ID NO: 1783 - protein, 19 aa, Homo sapiens
VLSNNSDANLELINTWVAK

SEQ ID NO: 1784 - protein, 19 aa, Homo sapiens
ASGSLPYTQTLQDHLNSLK

SEQ ID NO: 1785 - protein, 19 aa, Homo sapiens
FSEFWDLDPEVRPTSAVAA

SEQ ID NO: 1786 - protein, 19 aa, Homo sapiens
LISVDTEHSNIYLQNGPDR

SEQ ID NO: 1787 - protein, 19 aa, Homo sapiens
QLPGGQNPVSYVYLEVVSK

SEQ ID NO: 1788 - protein, 19 aa, Homo sapiens
SSNNPHSPIVEEFQVPYNK

SEQ ID NO: 1789 - protein, 19 aa, Homo sapiens
VDWGLPIPSPSPIHPAHHK

SEQ ID NO: 1790 - protein, 19 aa, Homo sapiens
LGSFEGLVNLTFIHLQHNR

SEQ ID NO: 1791 - protein, 19 aa, Homo sapiens
LNLVATPLFLKPGIPYPIK

SEQ ID NO: 1792 - protein, 19 aa, Homo sapiens
SLTFNETYQDISELVYGAK

SEQ ID NO: 1793 - protein, 19 aa, Homo sapiens
TLYETEVFSTDFSNISAAK

SEQ ID NO: 1794 - protein, 19 aa, Homo sapiens
VSNQTLSLFFTVLQDVPVR

SEQ ID NO: 1795 - protein, 20 aa, Homo sapiens
QLGLPGPPDVPDHAAYHPFR

SEQ ID NO: 1796 - protein, 20 aa, Homo sapiens
EYYFAEAQIADFSDPAFISK

SEQ ID NO: 1797 - protein, 20 aa, Homo sapiens
HYYIGIIETTWDYASDHGEK

SEQ ID NO: 1798 - protein, 20 aa, Homo sapiens
LEIQSQVDSQHVGHSVLTAK

SEQ ID NO: 1799 - protein, 20 aa, Homo sapiens
SSIDIENGFISESQYTYALK

SEQ ID NO: 1800 - protein, 20 aa, Homo sapiens
YTYNYEAESSSGVPGTADSR

SEQ ID NO: 1801 - protein, 20 aa, Homo sapiens
FNLTETSEAEIHQSFQHLLR

SEQ ID NO: 1802 - protein, 20 aa, Homo sapiens
GPHALGAPSLLLTGTQLYGR

SEQ ID NO: 1803 - protein, 20 aa, Homo sapiens
TFVLSALQPSPTHSSSNTQR

SEQ ID NO: 1804 - protein, 20 aa, Escherichia coli
DVSLLHKPTTQISDFHVATR

SEQ ID NO: 1805 - protein, 20 aa, Homo sapiens
VLLLGSQQAGTTLNLDLGGK

SEQ ID NO: 1806 - protein, 20 aa, Homo sapiens
ENLTAPGSDSAVFFEQGTTR

SEQ ID NO: 1807 - protein, 20 aa, Homo sapiens
HSLNALLIFLIITSAWGGSK

SEQ ID NO: 1808 - protein, 20 aa, Homo sapiens
TLFLLLLLAASAWGVTLSPK

SEQ ID NO: 1809 - protein, 20 aa, Homo sapiens
VTILVEGGEIELFDGEVNVK

SEQ ID NO: 1810 - protein, 21 aa, Homo sapiens
ASSNPNATSSSSQDPESLQDR

SEQ ID NO: 1811 - protein, 21 aa, Homo sapiens
EDFLEQSEQLFGAKPVSLTGK

SEQ ID NO: 1812 - protein, 21 aa, Homo sapiens
GTHVDLGLASANVDFAFSLYK

SEQ ID NO: 1813 - protein, 21 aa, Homo sapiens
LAILPASAPPATSNPDPAVSR

SEQ ID NO: 1814 - protein, 21 aa, Homo sapiens
TLLVFEVQQPFLFVLWDQQHK

SEQ ID NO: 1815 - protein, 21 aa, Homo sapiens
VGQLQLSHNLSLVILVPQNLK

SEQ ID NO: 1816 - protein, 21 aa, Homo sapiens
AIAYSSLSQSYLYIDWTDNHK

SEQ ID NO: 1817 - protein, 21 aa, Homo sapiens
AQNLYQELLTQEGQASFQGLK

SEQ ID NO: 1818 - protein, 21 aa, Homo sapiens
AVLPQEEEGSGGGQLVTEVTK

SEQ ID NO: 1819 - protein, 21 aa, Homo sapiens
EYVLPHFSVSIEPEYNFIGYK

SEQ ID NO: 1820 - protein, 21 aa, Homo sapiens
HELTDEELQSLFTNFANVVDK

SEQ ID NO: 1821 - protein, 21 aa, Homo sapiens
HVEDVPAFQALGSLNDLQFFR

SEQ ID NO: 1822 - protein, 21 aa, Homo sapiens
IVGGTNSSWGEWPWQVSLQVK

SEQ ID NO: 1823 - protein, 21 aa, Homo sapiens
LIDLSIQNYHTFLIYITELLK

SEQ ID NO: 1824 - protein, 21 aa, Homo sapiens
NIPTVNENLENYYLEVNQLEK

SEQ ID NO: 1825 - protein, 21 aa, Homo sapiens
NPFVFAPTLLTVAVHFEEVAK

SEQ ID NO: 1826 - protein, 21 aa, Homo sapiens
NQDVHSINLPFFETLQEYFER

SEQ ID NO: 1827 - protein, 21 aa, Homo sapiens
QTVNLQLQPYSLVTTLNSDLK

SEQ ID NO: 1828 - protein, 21 aa, Homo sapiens
TAFISDFAVTADGNAFIGDIK

SEQ ID NO: 1829 - protein, 21 aa, Homo sapiens
TTLTAFGFASADLIEIGLEGK

SEQ ID NO: 1830 - protein, 21 aa, Homo sapiens
VVGVPYQGNATALFILPSEGK

SEQ ID NO: 1831 - protein, 22 aa, Homo sapiens
ALALPPLGLAPLLNLWAKPQGR

SEQ ID NO: 1832 - protein, 22 aa, Homo sapiens
AQPVQVAEGSEPDGFWEALGGK

SEQ ID NO: 1833 - protein, 22 aa, Homo sapiens
DGRPEIQLHNHWAQLTVGAGPR

SEQ ID NO: 1834 - protein, 22 aa, Homo sapiens
DPDQTDGLGLSYLSSHIANVER

SEQ ID NO: 1835 - protein, 22 aa, Homo sapiens
EFLGENISNFLSLAGNTYQLTR

SEQ ID NO: 1836 - protein, 22 aa, Homo sapiens
SRPSQVLDSPFPTGSAFGFSLR

SEQ ID NO: 1837 - protein, 22 aa, Homo sapiens
SWVPHTFESELSDPVELLVAES

SEQ ID NO: 1838 - protein, 22 aa, Homo sapiens
AALAAFNAQNNGSNFQLEEISR

SEQ ID NO: 1839 - protein, 22 aa, Homo sapiens
AFENVTDLQWLILDHNLLENSK

SEQ ID NO: 1840 - protein, 22 aa, Homo sapiens
AGTELVNFLSYFVELGTQPATQ

SEQ ID NO: 1841 - protein, 22 aa, Homo sapiens
AVVILVTDVSVDSVDAAADAAR

SEQ ID NO: 1842 - protein, 22 aa, Homo sapiens
EPGQDLVVLPLSITTDFIPSFR

SEQ ID NO: 1843 - protein, 22 aa, Homo sapiens
IADFELPTIIVPEQTIEIPSIK

SEQ ID NO: 1844 - protein, 22 aa, Homo sapiens
ILNLVSDPESGIVVNGQLVGAK

SEQ ID NO: 1845 - protein, 22 aa, Homo sapiens
LTGFIFFLFFLTESLTLPTQPR

SEQ ID NO: 1846 - protein, 22 aa, Homo sapiens
NFVASHIANILNSEELDIQDLK

SEQ ID NO: 1847 - protein, 22 aa, Escherichia coli
QLIELPELPQPESAGQLWLTVR

SEQ ID NO: 1848 - protein, 22 aa, Homo sapiens
VILGAHQEVNLESHVQEIEVSR

SEQ ID NO: 1849 - protein, 22 aa, Homo sapiens
VTQVYAENGTVLQGSTVASVYK

SEQ ID NO: 1850 - protein, 22 aa, Escherichia coli
VVQPNATAWSEAGHISAWQQWR

SEQ ID NO: 1851 - protein, 22 aa, Escherichia coli
YDENGNPWSAYGGDFGDTPNDR

SEQ ID NO: 1852 - protein, 23 aa, Homo sapiens
LTDVAPVSFFLVLDVVYLVYESK

SEQ ID NO: 1853 - protein, 23 aa, Homo sapiens
NTEILTGSWSDQTYPEGTQAIYK

SEQ ID NO: 1854 - protein, 23 aa, Homo sapiens
ADSVVDLLSYNVQGSGETTYDHK

SEQ ID NO: 1855 - protein, 23 aa, Homo sapiens
ATWLSLFSSEESNLGANNYDDYR

SEQ ID NO: 1856 - protein, 23 aa, Homo sapiens
ENTVTNDWIPEGEEDDDYLDLEK

SEQ ID NO: 1857 - protein, 23 aa, Homo sapiens
HYYIAAEEIIWNYAPSGIDIFTK

SEQ ID NO: 1858 - protein, 23 aa, Homo sapiens
LEFALLFLVFDENESWYLDDNIK

SEQ ID NO: 1859 - protein, 23 aa, Homo sapiens
LPGDIQVVPIGVGPNANVQELER

SEQ ID NO: 1860 - protein, 23 aa, Homo sapiens
NALTGLPPGLFQASATLDTLVLK

SEQ ID NO: 1861 - protein, 23 aa, Homo sapiens
NNATVHEQVGGPSLTSDLQAQSK

SEQ ID NO: 1862 - protein, 23 aa, Homo sapiens
NSLFFSAQPFEITASTNNEGNLK

SEQ ID NO: 1863 - protein, 23 aa, Homo sapiens
QQNAQGGFSSTQDTVVALHALSK

SEQ ID NO: 1864 - protein, 23 aa, Homo sapiens
SGQGEPLDDYVNTQGASLFSVTK

SEQ ID NO: 1865 - protein, 23 aa, Homo sapiens
SVPPSASHVAPTETFTYEWTVPK

SEQ ID NO: 1866 - protein, 24 aa, Homo sapiens
FDLVPVPTNLYGDFFTGDAYVILK

SEQ ID NO: 1867 - protein, 24 aa, Homo sapiens
VPVDPATYGQFYGGDSYIILYNYR

SEQ ID NO: 1868 - protein, 24 aa, Homo sapiens
VVLSSGSGPGLDLPLVLGLPLQLK

SEQ ID NO: 1869 - protein, 24 aa, Homo sapiens
DYAGVFSDAGLTFTSSSGQQTAQR

SEQ ID NO: 1870 - protein, 24 aa, Homo sapiens
FNHLGHIFTFTPQNNEFQLQLSPK

SEQ ID NO: 1871 - protein, 24 aa, Homo sapiens
GIETGSEDLEILPNGLAFISSGLK

SEQ ID NO: 1872 - protein, 24 aa, Homo sapiens
LELELRPTGEIEQYSVSATYELQR

SEQ ID NO: 1873 - protein, 24 aa, Homo sapiens
VDDGVASFVLNLPSGVTVLEFNVK

SEQ ID NO: 1874 - protein, 24 aa, Homo sapiens
VHNGSEILFSYFQDLVITLPFELR

SEQ ID NO: 1875 - protein, 24 aa, Homo sapiens
VSTVYANNGSVLQGTSVASVYHGK

SEQ ID NO: 1876 - protein, 25 aa, Homo sapiens
LPEGSVSLIILLTDGDPTVGETNPR

SEQ ID NO: 1877 - protein, 25 aa, Homo sapiens
LPTQNITFQTESSVAEQEAEFQSPK

SEQ ID NO: 1878 - protein, 25 aa, Homo sapiens
AGELEVFNGYFVHFFAPDNLDPIPK

SEQ ID NO: 1879 - protein, 25 aa, Homo sapiens
ALLLLGFLLVSLESTLSIPPWEAPK

SEQ ID NO: 1880 - protein, 25 aa, Homo sapiens
FFSLLSGSLNSHGLELNADILGTDK

SEQ ID NO: 1881 - protein, 25 aa, Homo sapiens
FTYLINYIQDEINTIFSDYIPYVFK

SEQ ID NO: 1882 - protein, 25 aa, Homo sapiens
GLLVGEILSAVLSQEGINILTHLPK

SEQ ID NO: 1883 - protein, 25 aa, Homo sapiens
IDFLNNYALFLSPSAQQASWQVSAR

SEQ ID NO: 1884 - protein, 25 aa, Homo sapiens
IFELFEVGFLSPATFTVYEYHRPDK

SEQ ID NO: 1885 - protein, 25 aa, Homo sapiens
LTQVSVLQYGSITTIDVPWNVVPEK

SEQ ID NO: 1886 - protein, 25 aa, Escherichia coli
NHPSVIIWSLGNESGHGANHDALYR

SEQ ID NO: 1887 - protein, 25 aa, Homo sapiens
VGASENIVIQVYGYTEAFDATISIK

SEQ ID NO: 1888 - protein, 25 aa, Homo sapiens
YLSLVGQVYSTLVTYISDWWTLAAK

SEQ ID NO: 1889 - protein, 25 aa, Homo sapiens
YLYIAVTVIESTGGFSEEAEIPGIK

SEQ ID NO: 1890 - protein, 26 aa, Homo sapiens
EDYLDVYVFGVGPLVNQVNINALASK

SEQ ID NO: 1891 - protein, 26 aa, Homo sapiens
LWAYLTIQQLLEQTVSASDADQQALR

SEQ ID NO: 1892 - protein, 26 aa, Homo sapiens
GFGSLNDEGEGEFWLGNDYLHLLTQR

SEQ ID NO: 1893 - protein, 26 aa, Homo sapiens
GTVIDVTDFVNWASSINDAPVLISQK

SEQ ID NO: 1894 - protein, 26 aa, Homo sapiens
LQELHLSSNGLESLSPEFLRPVPQLR

SEQ ID NO: 1895 - protein, 26 aa, Homo sapiens
QRPPDLDTSSNAVDLLFFTDESGDSR

SEQ ID NO: 1896 - protein, 26 aa, Homo sapiens
YGGGFYSTQDTINAIEGLTEYSLLVK

SEQ ID NO: 1897 - protein, 27 aa, Homo sapiens
GAVDIDDNGYPDLIVGAYGANQVAVYR

SEQ ID NO: 1898 - protein, 27 aa, Homo sapiens
IQEFLSGLPEDTVLLLLNAIHFQGFWR

SEQ ID NO: 1899 - protein, 27 aa, Homo sapiens
QGFEPPSFVGWFLGWDDDYWSVDPLDR

SEQ ID NO: 1900 - protein, 27 aa, Homo sapiens
VSLSVYLGEFFDIHLFVNGTVTQGDQR

SEQ ID NO: 1901 - protein, 27 aa, Homo sapiens
VSTQNLLLLLTDNEAWNGFVAAAELPR

SEQ ID NO: 1902 - protein, 27 aa, Homo sapiens
DFHSEYIVSASNFTSQLSSQVEQFLHR

SEQ ID NO: 1903 - protein, 27 aa, Homo sapiens
FSDEGTHESQISFTIEGPLTSFGLSNK

SEQ ID NO: 1904 - protein, 27 aa, Homo sapiens
LLVYYIVTGEQTAELVSDSVWLNIEEK

SEQ ID NO: 1905 - protein, 27 aa, Homo sapiens
LQETSNWLLSQQQADGSFQDLSPVIHR

SEQ ID NO: 1906 - protein, 27 aa, Homo sapiens
NISDGFDGIPDNVDAALALPAHSYSGR

SEQ ID NO: 1907 - protein, 27 aa, Homo sapiens
VHANPLLIDVVTYLVALIPEPSAQQLR

SEQ ID NO: 1908 - protein, 28 aa, Homo sapiens
QAAGSGHLLALGTPENPSWLSLHLQDQK

SEQ ID NO: 1909 - protein, 29 aa, Homo sapiens
DQFNLIVFSTEATQWRPSLVPASAENVNK

SEQ ID NO: 1910 - protein, 29 aa, Homo sapiens
GTEAAAVPEVELSDQPENTFLHPIIQIDR

SEQ ID NO: 1911 - protein, 30 aa, Homo sapiens
NVIFSPLSISTALAFLSLGAHNTTLTEILK

SEQ ID NO: 1912 - protein, 30 aa, Homo sapiens
ADNFLLENTLPAQSTFTLAISAYALSLGDK

SEQ ID NO: 1913 - protein, 30 aa, Homo sapiens
GDSVVWYLFSAGNEADVHGIYFSGNTYLWR

SEQ ID NO: 1914 - protein, 30 aa, Homo sapiens
GGVEDEVTLSAYITIALLEIPLTVTHPVVR

SEQ ID NO: 1915 - protein, 30 aa, Homo sapiens
LSHNELADSGIPGNSFNVSSLVELDLSYNK

SEQ ID NO: 1916 - protein, 30 aa, Homo sapiens
YSQPEDSLIPFFEITVPESQLTVSQFTLPK

SEQ ID NO: 1917 - protein, 5 aa, Homo sapiens
ISLPE

SEQ ID NO: 1918 - protein, 4 aa, Homo sapiens
GWVT

SEQ ID NO: 1919 - protein, 5 aa, Homo sapiens
NFPVD

SEQ ID NO: 1920 - protein, 9 aa, Homo sapiens
LVNEVTEFA
